(19) United States
(12) Patent Application Publication
(10) Pub. No.: US 2022/0310230 A1
(43) Pub. Date: Sep. 29, 2022

(54) BIOMARKERS FOR DETERMINING AN IMMUNO-ONOCOLOGY RESPONSE

(71) Applicant: Venn Biosciences Corporation, South San Francisco, CA (US)

(72) Inventors: Daniel SERIE, San Mateo, CA (US); Chad Eagle PICKERING, San Mateo, CA (US); Alan Nicolas MITCHELL, Fresno, CA (US); Gege XU, Redwood City, CA (US); Klaus LINDPAINTER, Concord, NH (US)

(73) Assignee: Venn Biosciences Corporation, South San Francisco, CA (US)

(21) Appl. No.: 17/688,788

(22) Filed: Mar. 7, 2022

Related U.S. Application Data
(60) Provisional application No. 63/158,283, filed on Mar. 8, 2021.
(60) Provisional application No. 63/246,293, filed on Sep. 20, 2021.
(60) Provisional application No. 63/251,023, filed on Sep. 30, 2021.

(51) Int. Cl. G16H 20/40; G16B 15/00; G16H 10/40

(52) U.S. Cl. CPC G16H 20/40; G16B 15/00; G16H 10/40

(57) ABSTRACT

Provided herein are methods, devices, and kits for identifying glycosylated polypeptide biomarkers and signatures for progression of a disease or a condition, such as cancer, or and response of the disease or condition to a treatment, such as treatment with immune checkpoint blockade for cancer. Provided herein are methods of generating glycosylated polypeptide biomarkers and methods of analyzing glycosylated polypeptides using mass spectrometry. Provided herein are methods of validating a model using glycosylated polypeptides for predicting the disease or condition or for making treatment recommendation.

### CROSS-REFERENCE TO RELATED APPLICATIONS

[0001] This application claims the benefit under 35 U.S.C. § 119(e) of U.S. Provisional Patent Application No. 63/158,283, filed 8 Mar. 2021, U.S. Provisional Patent Application No. 63/246,293, filed 20 Sep. 2021, and U.S. Provisional Patent Application No. 63/251,023, filed 30 Sep. 2021, each of which is incorporated herein by reference.

### SUBMISSION OF SEQUENCE LISTING ON ASCII TEXT FILE

[0002] The content of the following submission on ASCII text file is incorporated herein by reference in its entirety: a computer readable form (CRF) of the Sequence Listing (file name: 166532000900SEQLIST.txt, date recorded: Mar. 6, 2022, size: 674,724 bytes

### BACKGROUND

[0003] Protein glycosylation and other post-translational modifications play vital roles in virtually all aspects of human physiology. Unsurprisingly, faulty or altered protein glycosylation often accompanies various disease states. The identification of aberrant glycosylation provides opportunities for early detection, intervention, and treatment of affected subjects. Current biomarker identification methods, such as those developed in the fields of proteomics and genomics, can be used to detect indicators of certain diseases, such as cancer, and to differentiate certain types of cancer from other, non-cancerous diseases. However, the use of glycoproteomic analyses has not previously been used to successfully manage treatment of a subject.

[0004] Glycoprotein analysis is fraught with challenges on several levels. For example, a single glycan composition in a glycopeptide can contain a large number of isomeric structures due to different glycosidic linkages, branching patterns, and/or multiple monosaccharides having the same mass. In addition, the presence of multiple glycans that share the same peptide backbone can lead to assay signals from various glycoforms, lowering their individual abundances compared to aglycosylated peptides. Accordingly, the development of algorithms that can identify glycan structures on peptide fragments remains elusive.

[0005] In light of the above, there is a desire for improved analytical methods that involve site-specific analysis of glycoproteins to obtain information about protein glycosylation patterns, which can in turn provide quantitative information that can be used to manage the treatment of a subject diagnosed with a particular disease or condition. Thus, it may be desirable to have methods and systems capable of addressing one or more of the above-identified issues.

### SUMMARY

[0006] In one or more embodiment, a method is provided for managing a treatment for a subject diagnosed with a melanoma condition. The method includes receiving peptide structure data corresponding to a set of glycoproteins in a biological sample obtained from the subject. A treatment score is computed using quantification data identified from the peptide structure data for a set of peptide structures. The set of peptide structures includes at least one peptide structure identified from a plurality of peptide structures listed in Table 1. A treatment output that indicates a predicted response to the treatment for the subject is generated using the treatment score.

[0007] In one or more embodiments, a method is provided for treatment management of a subject diagnosed with a melanoma condition. The method includes receiving peptide structure data corresponding to a set of peptide structures associated with a set of glycoproteins in a biological sample obtained from the subject. A plurality of treatment scores is computed using quantification data identified from the peptide structure data for a plurality of subsets of the set of peptide structures. Each treatment score of the plurality of treatment scores corresponds to a different treatment of a plurality of treatments; wherein each subset of the plurality of subsets includes at least one peptide structure identified from a plurality of peptide structures listed in Table 1. A comparison analysis of the plurality of treatment scores is performed. A treatment output is generated based on the comparison analysis. The treatment output includes a recommended treatment plan for treating the subject.

[0008] In one or more embodiments, a method is provided for treatment management of a subject diagnosed with a melanoma condition. The method includes receiving peptide structure data corresponding to a set of peptide structures associated with a set of glycoproteins in a biological sample obtained from the subject. A first treatment score is computed for a first treatment of pembrolizumab using first quantification data identified from the peptide structure data for a first subset of the set of peptide structures. The first subset includes at least one peptide structure identified from a plurality of peptide structures listed in Table 2. A second treatment score is computed for a second treatment comprised of nivolumab and ipilimumab using second quantification data identified from the peptide structure data for a second subset of the set of peptide structures. The second subset includes at least one peptide structure identified from a plurality of peptide structures listed in Table 3. A comparison analysis of the first treatment score and the second treatment score is performed. A treatment output is generated based on the comparison analysis. The treatment output identifies one of the first treatment and the second treatment as a recommended treatment for the subject.

[0009] In one or more embodiments, a method is provided for treating a subject diagnosed with a melanoma condition. The method includes receiving peptide structure data corresponding to a set of glycoproteins in a biological sample obtained from the subject. A treatment score is computed using quantification data identified from the peptide structure data for a set of peptide structures. The set of peptide structures includes at least one peptide structure identified from a plurality of peptide structures listed in Table 1. A treatment output that indicates a predicted response to a treatment for the subject is generated using the treatment score. The treatment is administered to the patient in response to the predicted response including a positive response classification. The step of administering comprises at least one of intravenous or oral administration of the recommended treatment or a derivative thereof at a therapeutic dosage. The treatment is selected as one from a group consisting of: a first treatment of pembrolizumab for which the therapeutic dosage of at least one of 200 mg every three weeks, 2 mg/kg every three weeks is administered, or 400 mg every 6 weeks; and a second treatment comprised of nivolumab and ipilimumab for which the therapeutic dosage of either 1 mg/kg nivolumab with 3 mg/kg ipilimumab or 3 mg/kg nivolumab with 1 mg/kg ipilimumab is administered.

[0010] In one or more embodiments, a method is provided for managing a treatment for a subject diagnosed with a melanoma condition. The method includes receiving sample data for a sample population. The sample data characterizes responses of a plurality of sample subjects diagnosed with the melanoma condition to the treatment and includes sample peptide structure data for a collection of peptide structures for each subject of the plurality of sample subjects. The sample data is grouped based on the responses of the plurality of sample subjects into a first group corresponding to a first response classification and a second group corresponding to a second response classification. A differential abundance analysis is performed using the sample data to compare the first group of the sample data corresponding to the first response classification and the second group of the sample data corresponding to the second response classification to identify a set of peptide structures from the collection of peptide structures. The set of peptide structures comprises a selected N most differentiating peptide structures between the first response classification and the second response classification. Peptide structure data corresponding to a set of glycoproteins in a biological sample obtained from the subject is received. A treatment score is computed for the treatment using quantification data identified from the peptide structure data for the set of peptide structures. A treatment output that indicates a predicted response to the treatment for the subject is generated using the treatment score.

[0011] In one or more embodiments, a method of treating melanoma in a subject is provided. The method includes receiving peptide structure data corresponding to a set of glycoproteins in a biological sample obtained from the subject. A treatment score is computed using quantification data identified from the peptide structure data for a set of peptide structures. The set of peptide structures includes at least one peptide structure identified from a plurality of peptide structures listed in Table 1. A treatment output is computed using the treatment score. A pembrolizumab treatment is administered to the subject if the treatment output includes at least one of a positive response classification for the pembrolizumab treatment or an identification of the pembrolizumab treatment as a recommended treatment.

[0012] In one or more embodiments, a method of treating melanoma in a subject is provided. The method includes receiving peptide structure data corresponding to a set of glycoproteins in a biological sample obtained from the subject. A treatment score is computed using quantification data identified from the peptide structure data for a set of peptide structures. The set of peptide structures includes at least one peptide structure identified from a plurality of peptide structures listed in Table 1. A treatment output is computed using the treatment score. A combination treatment comprising a combination of nivolumab and ipilimumab is administered to the subject if the treatment output includes at least one of a positive response classification for the combination treatment or an identification of the combination treatment as a recommended treatment.

[0013] In one or more embodiments, a method of identifying patients with melanoma for treatment with a pembrolizumab treatment is provided. The method includes receiving peptide structure data corresponding to a set of glycoproteins in a biological sample obtained from the subject. A treatment score is computed using quantification data identified from the peptide structure data for a set of peptide structures. The set of peptide structures includes at least one peptide structure identified from a plurality of peptide structures listed in Table 1. A treatment output is generated using the treatment score. The patient is treated with the pembrolizumab treatment if the treatment output includes at least one of a positive response classification for the pembrolizumab treatment or an identification of the pembrolizumab treatment as a recommended treatment.

[0014] In one or more embodiments, a method of identifying patients with melanoma for treatment with a combination treatment comprising nivolumab and ipilimumab is provided. The method includes receiving peptide structure data corresponding to a set of glycoproteins in a biological sample obtained from the subject. A treatment score is computed using quantification data identified from the peptide structure data for a set of peptide structures. The set of peptide structures includes at least one peptide structure identified from a plurality of peptide structures listed in Table 1. A treatment output is generated using the treatment score. The patient is treated with the combination treatment if the treatment output includes at least one of a positive response classification for the combination treatment or an identification of the combination treatment as a recommended treatment.

[0015] In one or more embodiments, a method is provided for analyzing a set of peptide structures in a sample from a patient. The method includes (a) obtaining the sample from the patient; (b) preparing the sample to form a prepared sample comprising a set of peptide structures; (c) inputting the prepared sample into a reaction monitoring mass spectrometry system to detect a set of product ions associated with each peptide structure of the set of peptide structures; and (d) generating quantification data for the set of product ions using the reaction monitoring mass spectrometry system. The set of peptide structures includes at least one peptide structure selected from peptide structures PS-1 to PS-38 identified in Table 6. The set of peptide structures includes a peptide structure that is characterized as having: (i) a precursor ion with a mass-charge (m/z) ratio within ±1.5 of the m/z ratio listed for the precursor ion in Table 6 as corresponding to the peptide structure; and (ii) a product ion having an m/z ratio within ±1.0 of the m/z ratio listed for the first product ion in Table 6 as corresponding to the peptide structure.

[0016] In one or more embodiments, a composition is provided, the composition comprising a peptide structure or a product ion, wherein: the peptide structure or product ion comprises the amino acid sequence having at least 90% sequence identity to any one of SEQ ID NOS: 21-46, corresponding to peptide structures PS-1 to PS-38 in Table 1; and the product ion is selected as one from a group consisting of product ions identified in Table 6 including product ions falling within an identified m/z range.

[0017] In one or more embodiments, a composition is provided, the composition comprising a glycopeptide structure selected as one from a group consisting of peptide structures PS-1 to PS-38 identified in Table 6. The glycopeptide structure comprises: an amino acid peptide sequence identified in Table 5 as corresponding to the glycopeptide structure; and a glycan structure identified in Table 1 as corresponding to the glycopeptide structure in which the glycan structure is linked to a residue of the amino acid peptide sequence at a corresponding position identified in Table 1. The glycan structure has a glycan composition.

[0018] In one or more embodiments, a composition is provided, the composition comprising a peptide structure selected as one from a plurality of peptide structures identified in Table 1. The peptide structure has a monoisotopic mass identified as corresponding to the peptide structure in Table 1. The peptide structure comprises the amino acid sequence of SEQ ID NOs: 21-46 identified in Table 1 as corresponding to the peptide structure.

[0019] In one or more embodiments, a kit is provided, the kit comprising at least one agent for quantifying at least one peptide structure identified in Table 1 to carry out at least a portion of any one of the methods disclosed herein.

[0020] In one or more embodiments, a kit is provided, the kit comprising at least one of a glycopeptide standard, a buffer, or a set of peptide sequences to carry out at least a portion of any one of the methods disclosed herein, a peptide sequence of the set of peptide sequences identified by a corresponding one of SEQ ID NOS: 21-46, defined in Table 1.

[0021] Provided herein are methods, devices, and kits for identifying glycoproteomic biomarkers and signatures for diagnosis of a disease or a condition, such as cancer, progression of the disease or condition, and response of the disease or condition to a treatment, such as treatment with immune checkpoint blockade for cancer.

[0022] Provided herein are methods for identifying one or more glycopeptide biomarkers predictive of a disease or a condition in a subject, the method comprising: (a) obtaining from a subject a first sample at a first timepoint and a second sample at a second timepoint, wherein the first sample and the second sample comprise a glycoprotein; (b) fragmenting the glycoprotein in the first sample or the second sample into one or more glycopeptides, wherein the one or more glycopeptides comprise one or more amino acid sequences selected from a group consisting of SEQ ID NO: 101-131, 159-207, and 21-46, and combinations thereof; (c) determining an amount of the one or more glycopeptides using multiple reaction monitoring mass spectrometry (MRM-MS); (d) associating the amount of the one or more glycopeptides with the first timepoint or the second timepoint, wherein the subject has a change in a disease or a condition from the first timepoint to the second timepoint; and (e) identifying as glycopeptide biomarkers the glycopeptide where the amount of the one or more glycopeptides changed from the first timepoint to the second timepoint.

[0023] Provided herein are methods for identifying one or more glycopeptide biomarkers predictive of a disease or a condition in a subject, the method comprising: (a) obtaining, by a computer, data of an amount of one or more glycopeptides for a set (n) of subjects, wherein the one or more glycopeptides are generated by fragmenting a glycoprotein in a sample from a subject, the amount of one or more glycopeptides are determined using multiple reaction monitoring mass spectrometry (MRM-MS), and the data for each subject comprises data from samples taken at a plurality of timepoints; (b) selecting, by the computer, a subset of the one or more glycopeptides to include in a predictive model; (c) assessing, by the computer, the predictive model using a cross-validation with n−1 subjects to generate an outcome score for a holdout subject; (d) iterating, by the computer, step (c) for each of n subjects as the holdout subject to generate an outcome score for each subject; (e) dichotomizing, by the computer, the outcome scores for each subject at a cutoff outcome score as below or above the cutoff outcome score; (f) analyzing, by the computer, the amount of one or more glycopeptides for subjects having outcome scores above the cutoff outcome score to the amount of one or more glycopeptides for subjects having outcome scores below the cutoff outcome score for each glycopeptide in the subset of the one or more glycopeptides to determine a hazard ratio and an interaction p-value for each glycopeptide; (g) identifying, by the computer, the glycopeptide having the interaction p-value ≤0.05 as a glycopeptide biomarker for predicting the disease or the condition. In some embodiments, the cross-validation is leave-one-out cross-validation (LOOCV). In some embodiments, the cutoff outcome score was determined to optimize Harrell's C-index. In some embodiments, the interaction p-value is less than or equal to 0.01, 0.005, or 0.001 in step (g).

[0024] Provided herein are methods for assessing a status of a condition and a treatment in a subject, the method comprising: (a) fragmenting a glycoprotein in a sample from a subject into one or more glycopeptides, wherein the sample comprises one or more of glycoproteins, glycans, or glycopeptides; (b) performing mass spectroscopy (MS) on the one or more glycopeptides using multiple reaction monitoring mass spectrometry (MRM-MS) to quantify an amount of the one or more glycopeptides in the sample, wherein the one or more glycopeptides comprise one or more amino acid sequences selected from a group consisting of SEQ ID NOs: 7, 9, 12, 15, 16, 18, 20, 30, 34, 37, 44, 59, 60, 61, 62, 66, 69, 70, 75, 77, 80, and 83, and combinations thereof; (c) inputting data of the amount of the one or more glycopeptides into a trained model to generate an output probability, wherein the output probability is indicative of whether a treatment positively influences an outcome of the subject having a condition; and (d) generating a treatment recommendation based on the output probability, wherein the condition is melanoma and the treatment comprises checkpoint inhibitors. In some embodiments, the outcome comprises overall survival time. In some embodiments, the outcome comprises progression-free survival time. In some embodiments, the treatment comprises one or more of ipilimumab, nivolumab, and pembrolizumab. In some embodiments, the treatment comprises one or more of PD-1-, PD-L1-, and CTLA-4-inhibitors. In some embodiments, the recommendation comprises continuing the treatment if the output probability indicates the treatment positively influences the outcome.

[0025] Furthermore, provided herein are methods for assessing a status of a condition and a treatment in a subject, the method comprising: (a) fragmenting a glycoprotein in a sample from a subject into one or more glycopeptides, wherein the sample comprises one or more of glycoproteins, glycans, or glycopeptides; (b) performing mass spectroscopy (MS) on the one or more glycopeptides using multiple reaction monitoring mass spectrometry (MRM-MS) to quantify an amount of the one or more glycopeptides in the sample, wherein the one or more glycopeptides comprise one or more amino acid sequences selected from a group consisting of SEQ ID NOs: 300-429, and combinations thereof; (c) inputting data of the amount of the one or more glycopeptides into a trained model to generate an output probability, wherein the output probability is indicative of whether a treatment positively influences an outcome of the subject having a condition; and (d) generating a treatment recommendation based on the output probability, wherein the condition is non-small cell lung cancer (NSCLC) and the treatment comprises checkpoint inhibitors. In some embodiments, the outcome comprises overall survival time. In some embodiments, the outcome comprises progression-free survival time. In some embodiments, the treatment comprises one or more of ipilimumab, nivolumab, and pembrolizumab. In some embodiments, the treatment comprises one or more of PD-1-, PD-L1-, and CTLA-4-inhibitors. In some embodiments, the treatment comprises chemotherapy. In some embodiments, the chemotherapy comprises one or more of carboplatin and pemetrexed. In some embodiments, the recommendation comprises continuing the treatment if the output probability indicates the treatment positively influences the outcome.

[0026] Provided herein are glycopeptides comprising an amino acid sequence selected from a group consisting of SEQ ID NOs: 300-429, and combinations thereof.

[0027] Described herein are kits comprising a glycopeptide standard comprising a glycopeptide comprising one or more amino acid sequences selected from a group consisting of SEQ ID NOs: 300-429, and an instruction for using the glycopeptide standard for treating cancer.

[0028] In some embodiments, fragmenting comprises protease digestion. In some embodiments, fragmenting comprises applying a mechanical force. In some embodiments, the amount of one or more glycopeptides measures multiple reaction monitoring (MRM) transitions. In some embodiments, the method comprises further generating a panel of glycopeptide biomarkers comprising one or more of the glycopeptide biomarkers identified in step (e). In some embodiments, the cross-validation is leave-one-out cross-validation (LOOCV). In some embodiments, the cutoff outcome score was determined to optimize Harrell's C-index. In some embodiments, the interaction p-value is less than or equal to 0.01, 0.005, or 0.001 in step (g). In some embodiments, the outcome comprises overall survival time. In some embodiments, the outcome comprises progression-free survival time. In some embodiments, the treatment comprises one or more of ipilimumab, nivolumab, and pembrolizumab. In some embodiments, the treatment comprises one or more of PD-1-, PD-L1-, and CTLA-4-inhibitors. In some embodiments, the treatment comprises chemotherapy. In some embodiments, the chemotherapy comprises one or more of carboplatin and pemetrexed. In some embodiments, the recommendation comprises continuing the treatment if the output probability indicates the treatment positively influences the outcome.

[0029] In one or more embodiments, a system is provided that includes one or more data processors and a non-transitory computer readable storage medium containing instructions which, when executed on the one or more data processors, cause the one or more data processors to perform part or all of one or more methods disclosed herein.

[0030] In one or more embodiments, a computer-program product is provided that is tangibly embodied in a non-transitory machine-readable storage medium and that includes instructions configured to cause one or more data processors to perform part or all of one or more methods disclosed herein.

### BRIEF DESCRIPTION OF THE DRAWINGS

[0031] The present disclosure is described in conjunction with the appended figures:

[0032] FIG. 1 is a schematic diagram of an exemplary workflow 100 for the detection of peptide structures associated with a condition for use in treatment management in accordance with one or more embodiments.

[0033] FIG. 2A is a schematic diagram of a preparation workflow in accordance with one or more embodiments.

[0034] FIG. 2B is a schematic diagram of data acquisition in accordance with one or more embodiments.

[0035] FIG. 3 is a block diagram of an analysis system in accordance with one or more embodiments.

[0036] FIG. 4 is a block diagram of a computer system in accordance with various embodiments.

[0037] FIG. 5 is a flowchart of a process for managing a treatment for a subject diagnosed with a melanoma condition in accordance with one or more embodiments.

[0038] FIG. 6 is a flowchart of a process for treatment management of a subject diagnosed with a melanoma condition in accordance with various embodiments.

[0039] FIG. 7 is a flowchart of a process for treatment management of a subject diagnosed with a melanoma condition in accordance with various embodiments.

[0040] FIG. 8 is a flowchart of a process for identifying a treatment for a subject diagnosed with a melanoma condition in accordance with one or more embodiments.

[0041] FIG. 9 is a plot showing the distribution of the treatment scores generated for those patients who were treated with pembro in accordance with one or more embodiments.

[0042] FIG. 10 is a plot showing the distribution of the treatment scores generated for those patients who were treated with ipi/nivo in accordance with one or more embodiments.

[0043] FIG. 11 is a scatterplot showing the treatment scores by treatment type in accordance with one or more embodiments.

[0044] FIG. 12 is a plot showing disruption event times for patients treated with pembro by their predicted response.

[0045] FIG. 13 is a plot showing disruption event times for patients treated with ipi/nivo by their predicted response.

[0046] FIGS. 14A and 14B show progression-free survival (PFS) Kaplan-Meier curves of patients with metastatic melanoma for various glycopeptide fragments.

[0047] FIGS. 15A and 15B show progression-free survival (PFS) Kaplan-Meier curves of patients with non-small-cell lung cancer (NSCLC) for various glycopeptide fragments.

[0048] FIGS. 16-41 show overall survival (OS) Kaplan-Meier curves of patients with metastatic melanoma for various glycopeptide fragments.

[0049] FIGS. 42-80 show progression-free survival (PFS) Kaplan-Meier curves of patients with metastatic melanoma for various glycopeptide fragments.

[0050] FIGS. 81A and 81B illustrate an algorithm development pipeline for identifying non-small-cell lung cancer (NSCLC).

[0051] FIGS. 82A and 82B illustrate a multivariate classifier development for case-control studies for identifying non-small-cell lung cancer (NSCLC).

[0052] FIGS. 83A-83D illustrate scoring prediction curves for identifying non-small-cell lung cancer (NSCLC).

### DETAILED DESCRIPTION

[0053] Objective response rates for immune-oncology therapy are low in malignant melanoma and non-small cell lung cancer patients. Subjects should avoid unnecessary exposure and toxicities if they will not respond to immune-oncology therapy. Thus, in some aspects, the present invention is directed to identifying subjects who are not likely to respond to immune-oncology therapy (such as treatment with pembrolizumab and/or treatment with nivolumab and ipilimumab). In some embodiments the methods provided herein increase the rate of responder to immune-oncology treatments by identifying non-responders. Another advantage of the present method is that it can be used to reduce the cost associated with immune-oncology therapy per indication by avoiding treatment of subjects that are not likely to respond to treatment.

[0054] In some aspects, the present methods employ models and other predictive methods to assess the likelihood of response of a subject to immunotherapy. In some aspects, the methods provided herein have a high sensitivity for non-responders (those that are not likely to respond to immune-oncology therapy). In some aspects, the methods provided herein have a >95%, >97%, >98, or >99% sensitivity for detection of non-responders.

[0055] Provided herein are methods for management of treatment for subjects diagnosed with melanomas. In some embodiments, the subject is diagnosed with advanced melanoma. In some embodiments, the subject is diagnosed with malignant melanoma. In some embodiments, the subject is diagnosed with metastatic melanoma. In some embodiments, the method comprises determining whether the subject is likely to respond to an immunotherapy. In some embodiments, the method comprises determining whether the subject is likely to respond to treatment with pembrolizumab. In some embodiments, the method comprises determining whether the subject is likely to respond to treatment with nivolumab and ipilimumab.

[0056] Provided herein are methods of treating melanoma in a subject comprising administering a treatment to the subject. In some embodiments, the melanoma is advanced melanoma. In some embodiments, the melanoma is malignant melanoma. In some embodiments, the melanoma is metastatic melanoma. In some embodiments, the treatment comprises administering pembrolizumab to the subject. In some embodiments, the treatment comprises administering nivolumab and ipilimumab to the subject.

[0057] In some embodiments, the method comprises determining the likelihood of response of a subject having melanoma to nivolumab plus ipilimumab as a first line therapy. In some embodiments, the method comprises determining the likelihood of response to nivolumab plus ipilimumab as a second line therapy.

[0058] In some embodiments, the method comprises determining the likelihood of response of a subject having non-small cell lung cancer to pembrolizumab as a first line therapy. In some embodiments, the method comprises determining the likelihood of response to pembrolizumab as a second line therapy.

[0059] In some embodiments, the methods provided herein comprises generating a treatment output that predicts a response to an immune-oncology therapy (such as pembrolizumab or nivolumab plus ipilimumab) In some embodiments, the predicted response is likely responsive, likely nonresponsive, or indeterminate. In some embodiments, the treatment output is determined based upon the presence, absence, or amount of one or more glycopeptide set forth in Table 7, Table 12, Table 14, or Table 16. In some embodiments, the methods provided herein predict overall survival in subjects with melanoma. In some embodiments, the methods provided herein predict progression free survival in subject with NSCLC.

### 1. Managing Treatment of Melanoma

### I. Overview

[0060] The embodiments described herein recognize that glycoproteomics is an emerging field that can be used in the overall treatment of subjects (e.g., patients) with various types of diseases. Glycoproteomics aims to determine the positions, identities, and quantities of glycans and glycosylated proteins in a given sample (e.g., blood sample, cell, tissue, etc.). Protein glycosylation is one of the most common and most complex forms of post-translational protein modification, and can affect protein structure, conformation, and function. For example, glycoproteins may play crucial roles in important biological processes such as cell signaling, host-pathogen interactions, and immune response and disease. Glycoproteins may therefore be important to treating different types of diseases.

[0061] Although protein glycosylation provides useful information about cancer and other diseases, analysis of protein glycosylation may be difficult as the glycan typically cannot be traced back to the protein site of origin with currently available methodologies. Glycoprotein analysis can be challenging in general due to several reasons. For example, a single glycan composition in a peptide may contain a large number of isomeric structures because of different glycosidic linkages, branching, and many monosaccharides having the same mass. Further, the presence of multiple glycans that share the same peptide sequence may cause the mass spectrometry (MS) signal to split into various glycoforms, lowering their individual abundances compared to the peptides that are not glycosylated (aglycosylated peptides).

[0062] But to understand various disease conditions and more accurately manage the treatment of such disease conditions, such as melanoma, it may be important to perform analysis of glycoproteins and to identify not only the glycan but also the linking site (e.g., the amino acid residue of attachment) within the protein. Thus, there is a need to provide a method for site-specific glycoprotein analysis to obtain detailed information about protein glycosylation patterns which may be able to provide information that can be used to treat diseases, such as melanoma.

[0063] Melanoma is a type of cancer that develops from melanocytes, cells that product pigment. Melanoma may be treated using different types of treatment including, for example, immunotherapies. Such immunotherapies include various types of immune check point inhibitor treatments (e.g., pembrolizumab, nivolumab, ipilimumab) and cytokine therapies (e.g., interferon alpha (IFN-α) and Interleukin 2 (IL-2). Immune check point inhibitors include, for example, anti-cytotoxic T-lymphocyte-associated protein 4 (CTLA-4) monoclonal antibodies (e.g., ipilimumab, tremelimumab), toll-like receptor (TLR) agonists, cluster of differentiation 40 (CD40) agonists, anti-programmed cell death protein 1 (PD-1) (e.g., pembrolizumab, pidilizumab, and nivolumab) and programmed death-ligand 1 (PD-L1) antibodies.

[0064] Different patients may respond differently to different treatments. For example, some patients may have great success with one type of treatment while other patients may have limited or no success with that same treatment. Because melanoma is an aggressive cancer and one of the most serious cancers, subjects may not have the luxury of trying different types of treatments over time. It may be important to identify those subjects who are likely to respond to a given treatment to help avoid the burden associated with adverse events (e.g., events that disrupt a subject's progression-free survival) and to avoid the cost associated with treatment subjects who are not likely to respond to certain treatments. Previous methodologies generally focused on specific mechanisms of drug efficacy of a particular treatment. For example, such methodologies focused on tumor response rather than subject survival. But the embodiments described herein provide ways in which to predict treatment response with respect to survivability for different drugs so that a better selection of treatment may be selected for a subject at the outset.

[0065] Analyzing peptide structure expression in subjects and, in particular, glycopeptide structure abundance may help predict subject response to treatment for melanoma. A peptide structure may be defined by an aglycosylated peptide sequence (e.g., a peptide or peptide fragment of a larger parent protein) or a glycosylated peptide sequence. A glycosylated peptide sequence (also referred to as a glycopeptide structure) may be a peptide sequence having a glycan structure that is attached to a linking site (e.g., an amino acid residue) of the peptide sequence, which may occur via, for example, a particular atom of the amino acid residue). Non-limiting examples of glycosylated peptides include N-linked glycopeptides and O-linked glycopeptides.

[0066] Further, with glycoproteins, there may be too many potential proteoforms to consider. Still further, analysis of peptide structure data in the manner described by the various embodiments herein may be more conducive to accurately predicting treatment response as compared to glycomic analysis that provides little to no information about what proteins and to which amino acid residue sites various glycan structures attach.

[0067] By analyzing which peptide structures are most differentiating between different treatment response classifications of interest (e.g., sustained control and early disruption) for a given treatment and then analyzing a subject's peptide structure profile of those particular peptide structures, a clearer understanding of how that subject will respond to that treatment may be achieved.

[0068] Accordingly, the embodiments described herein provide various methods and systems for analyzing proteins in subjects and, in particular, glycoproteins. In one or more embodiments, methods and systems are provided for treatment management of a subject diagnosed with a melanoma condition. For example, the embodiments described herein provide methods and systems for receiving peptide structure data corresponding to a set of glycoproteins in a biological sample obtained from the subject; computing a treatment score using quantification data identified from the peptide structure data for a set of peptide structures, wherein the set of peptide structures includes at least one peptide structure identified from a plurality of peptide structures listed in Table 1; and generating a treatment output that indicates a predicted response to the treatment for the subject using the treatment score. The predicted response may indicate whether the subject is likely to have sustained control (e.g., no disruption events that might disrupt the subject's progression-free survival within 12 months of treatment) with the treatment or to have early disruption (e.g., one or more disruption events within the first 6 months of treatment).

[0069] The description below provides exemplary implementations of the methods and systems described herein for the research and/or treatment (e.g., designing, planning, administration, etc. of a treatment) of melanoma. Descriptions and examples of various terms, as used herein, are provided in Section II below.

### II. Exemplary Descriptions of Terms

[0070] The term “ones” means more than one.

[0071] As used herein, the term “plurality” may be 2, 3, 4, 5, 6, 7, 8, 9, 10, or more.

[0072] As used herein, the term “set of” means one or more. For example, a set of items includes one or more items.

[0073] As used herein, the phrase “at least one of,” when used with a list of items, means different combinations of one or more of the listed items may be used and only one of the items in the list may be needed. The item may be a particular object, thing, step, operation, process, or category. In other words, “at least one of” means any combination of items or number of items may be used from the list, but not all of the items in the list may be required. For example, without limitation, “at least one of item A, item B, or item C” means item A; item A and item B; item B; item A, item B, and item C; item B and item C; or item A and C. In some cases, “at least one of item A, item B, or item C” means, but is not limited to, two of item A, one of item B, and ten of item C; four of item B and seven of item C; or some other suitable combination.

[0074] As used herein, “substantially” means sufficient to work for the intended purpose. The term “substantially” thus allows for minor, insignificant variations from an absolute or perfect state, dimension, measurement, result, or the like such as would be expected by a person of ordinary skill in the field but that do not appreciably affect overall performance. When used with respect to numerical values or parameters or characteristics that can be expressed as numerical values, “substantially” means within ten percent.

[0075] The term “amino acid,” as used herein, generally refers to any organic compound that includes an amino group (e.g. —NH2), a carboxyl group (—COOH), and a side chain group (R) which varies based on a specific amino acid. Amino acids can be linked using peptide bonds.

[0076] The term “alkylation,” as used herein, generally refers to the transfer of an alkyl group from one molecule to another. In various embodiments, alkylation is used to react with reduced cysteines to prevent the re-formation of disulfide bonds after reduction has been performed.

[0077] The term “linking site” or “glycosylation site” as used herein generally refers to the location where a sugar molecule of a glycan or glycan structure is directly bound (e.g. covalently bound) to an amino acid of a peptide, a polypeptide, or a protein. For example, the linking site may be an amino acid residue and a glycan structure may be linked via an atom of the amino acid residue. Non-limiting examples of types of glycosylation can include N-linked glycosylation, O-linked glycosylation, C-linked glycosylation, S-linked glycosylation, and glycation.

[0078] The terms “biological sample,” “biological specimen,” or “biospecimen” as used herein, generally refers to a specimen taken by sampling so as to be representative of the source of the specimen, typically, from a subject. A biological sample can be representative of an organism as a whole, specific tissue, cell type, or category or sub-category of interest. The biological sample can include a macromolecule. The biological sample can include a small molecule. The biological sample can include a virus. The biological sample can include a cell or derivative of a cell. The biological sample can include an organelle. The biological sample can include a cell nucleus. The biological sample can include a rare cell from a population of cells. The biological sample can include any type of cell, including without limitation prokaryotic cells, eukaryotic cells, bacterial, fungal, plant, mammalian, or other animal cell type, mycoplasmas, normal tissue cells, tumor cells, or any other cell type, whether derived from single cell or multicellular organisms. The biological sample can include a constituent of a cell. The biological sample can include nucleotides (e.g. ssDNA, dsDNA, RNA), organelles, amino acids, peptides, proteins, carbohydrates, glycoproteins, or any combination thereof. The biological sample can include a matrix (e.g., a gel or polymer matrix) comprising a cell or one or more constituents from a cell (e.g., cell bead), such as DNA, RNA, organelles, proteins, or any combination thereof, from the cell. The biological sample may be obtained from a tissue of a subject. The biological sample can include a hardened cell. Such hardened cells may or may not include a cell wall or cell membrane. The biological sample can include one or more constituents of a cell but may not include other constituents of the cell. An example of such constituents may include a nucleus or an organelle. The biological sample may include a live cell. The live cell can be capable of being cultured.

[0079] The term “denaturation,” as used herein, generally refers to any molecule that loses quaternary structure, tertiary structure, and secondary structure which is present in their native state. Non-limiting examples include proteins or nucleic acids being exposed to an external compound or environmental condition such as acid, base, temperature, pressure, radiation, etc.

[0080] The term “denatured protein,” as used herein, generally refers to a protein that loses quaternary structure, tertiary structure, and secondary structure which is present in their native state.

[0081] The terms “digestion” or “enzymatic digestion,” as used herein, generally refer to breaking apart a polymer (e.g. cutting a polypeptide at a cut site). Proteins may be digested in preparation for mass spectrometry using trypsin digestion protocols. Proteins may be digested using other proteases in preparation for mass spectrometry if access is limited to cleavage sites.

[0082] The term “treatment” may generally refer to any number of drugs, therapeutics, lifestyle modifications, behavioral modifications, dietary modifications, or combination thereof that can be used to treat a subject suffering form a disease condition.

[0083] The term “therapeutic” may refer generally to any drug that can be administered to a subject physically (e.g., via oral, intravenous injection, topical treatment, exposure, etc.).

[0084] The terms “immune checkpoint inhibitor,” “immune checkpoint inhibitor therapeutic,” and “immune checkpoint inhibitor drug,” as used herein, generally refer to drugs or therapeutics that can target immune checkpoint molecules (e.g. molecules on immune cells that need to be activated (or inactivated) to start an immune response). Non-limiting examples of immune checkpoint inhibitor therapeutics can include pembrolizumab, nivolumab, and ipilimumab.

[0085] The terms “glycan” or “polysaccharide” as used herein, both generally refer to a carbohydrate residue of a glycoconjugate, such as the carbohydrate portion of a glycopeptide, glycoprotein, glycolipid, or proteoglycan. Glycans can include monosaccharides.

[0086] The term “glycopeptide” or “glycopolypeptide” as used herein, generally refer to a peptide or polypeptide comprising at least one glycan residue. In various embodiments, glycopeptides comprise carbohydrate moieties (e.g. one or more glycans) covalently attached to a side chain (i.e. R group) of an amino acid residue.

[0087] The term “glycoprotein,” as used herein, generally refers to a protein having at least one glycan residue bonded thereto. In some examples, a glycoprotein is a protein with at least one oligosaccharide chain covalently bonded thereto. Examples of glycoproteins, include but are not limited to apolipoprotein C-III (APOC3), alpha-1-antichymotrypsin (AACT), afamin (AFAM), alpha-1-acid glycoprotein 1 & 2 (AGP12), apolipoprotein B-100 (APOB), apolipoprotein D (APOD), complement C1s subcomponent (C1S), calpain-3 (CAN3), clusterin (CLUS), complement component C8AChain (CO8A), alpha-2-HS-glycoprotein (FETUA), haptoglobin (HPT), immunoglobulin heavy constant gamma 1 (IgG1), immunoglobulin J chain (IgJ), plasma kallikrein (KLKB1), serum paraoxonase/arylesterase 1 (PON1), prothrombin (THRB), serotransferrin (TRFE), protein unc-13 homologA (UN13A), and zinc-alpha-2-glycoprotein (ZA2G). A glycopeptide, as used herein, refers to a fragment of a glycoprotein, unless specified otherwise to the contrary.

[0088] The term “liquid chromatography,” as used herein, generally refers to a technique used to separate a sample into parts. Liquid chromatography can be used to separate, identify, and quantify components.

[0089] The term “mass spectrometry,” as used herein, generally refers to an analytical technique used to identify molecules. In various embodiments described herein, mass spectrometry can be involved in characterization and sequencing of proteins.

[0090] The term “peptide,” as used herein, generally refers to amino acids linked by peptide bonds. Peptides can include amino acid chains between 10 and 50 residues. Peptides can include amino acid chains shorter than 10 residues, including, oligopeptides, dipeptides, tripeptides, and tetrapeptides. Peptides can include chains longer than 50 residues and may be referred to as “polypeptides” or “proteins.”

[0091] The terms “protein” or “polypeptide” or “peptide” may be used interchangeably herein and generally refer to a molecule including at least three amino acid residues. Proteins can include polymer chains made of amino acid sequences linked together by peptide bonds. Proteins may be digested in preparation for mass spectrometry using trypsin digestion protocols. Proteins may be digested using other proteases in preparation for mass spectrometry if access is limited to cleavage sites.

[0092] The term “peptide structure,” as used herein, generally refers to peptides or a portion thereof or glycopeptides or a portion thereof. In various embodiments described herein, a peptide structure can include any molecule comprising at least two amino acids in sequence.

[0093] The term “reduction,” as used herein, generally refers to the gain of an electron by a substance. In various embodiments described herein, a sugar can directly bind to a protein, thereby, reducing the amino acid to which it binds. Such reducing reactions can occur in glycosylation. In various embodiments, reduction may be used to break disulfide bonds between two cysteines.

[0094] The term “sample,” as used herein, generally refers to a sample from a subject of interest and may include a biological sample of a subject. The sample may include a cell sample. The sample may include a cell line or cell culture sample. The sample can include one or more cells. The sample can include one or more microbes. The sample may include a nucleic acid sample or protein sample. The sample may also include a carbohydrate sample or a lipid sample. The sample may be derived from another sample. The sample may include a tissue sample, such as a biopsy, core biopsy, needle aspirate, or fine needle aspirate. The sample may include a fluid sample, such as a blood sample, urine sample, or saliva sample. The sample may include a skin sample. The sample may include a cheek swab. The sample may include a plasma or serum sample. The sample may include a cell-free or cell free sample. A cell-free sample may include extracellular polynucleotides. The sample may originate from blood, plasma, serum, urine, saliva, mucosal excretions, sputum, stool, or tears. The sample may originate from red blood cells or white blood cells. The sample may originate from feces, spinal fluid, CNS fluid, gastric fluid, amniotic fluid, cyst fluid, peritoneal fluid, marrow, bile, other body fluids, tissue obtained from a biopsy, skin, or hair.

[0095] The term “sequence,” as used herein, generally refers to a biological sequence including one-dimensional monomers that can be assembled to generate a polymer. Non-limiting examples of sequences include nucleotide sequences (e.g. ssDNA, dsDNA, and RNA), amino acid sequences (e.g. proteins, peptides, and polypeptides), and carbohydrates (e.g. compounds including Cₘ(H₂O))ₙ).

[0096] The term “subject,” as used herein, generally refers to an animal, such as a mammal (e.g., human) or avian (e.g., bird), or other organism, such as a plant. For example, the subject can include a vertebrate, a mammal, a rodent (e.g., a mouse), a primate, a simian or a human. Animals may include, but are not limited to, farm animals, sport animals, and pets. A subject can include a healthy or asymptomatic individual, an individual that has or is suspected of having a disease (e.g., cancer) or a pre-disposition to the disease, and/or an individual that is in need of therapy or suspected of needing therapy. A subject can be a patient. A subject can include a microorganism or microbe (e.g., bacteria, fungi, archaea, viruses).

[0097] As used herein, a “model” may include one or more algorithms, one or more functions, one or more equations, one or more statistical tests, one or more mathematical techniques, one or more machine-learning algorithms, or a combination thereof.

[0098] As used herein, “abundance,” may refer to a quantitative value generated using mass spectrometry. The quantitative value may relate to the amount of a particular peptide structure. In one or more embodiments, the quantitative value may include an amount of an ion produced using mass spectrometry. The quantitative value may be expressed as an m/z value, in atomic mass units, or in some other manner.

[0099] As used herein, “relative abundance,” may refer to a comparison of two or more abundances. In one or more embodiments, the comparison may include comparing one peptide structure to a total number of a set of peptide structures (e.g., the total number of all peptide structures). In some embodiments, the comparison may include comparing one peptide glycoform (e.g., two identical peptides differing by one or more glycans) to a set of peptide glycoforms. In one or more embodiments, the comparison may include comparing a number of ions having a particular m/z ratio versus a total number of ions detected. In one or more embodiments, a relative abundance can be expressed as a ratio, as a percentage, or in some other manner.

[0100] The terms “determining”, “measuring”, “evaluating”, “assessing,” “assaying,” and “analyzing” are often used interchangeably herein to refer to forms of measurement, and include determining if an element is present or not (for example, detection). These terms can include quantitative, qualitative or quantitative and qualitative determinations. Assessing is alternatively relative or absolute. “Detecting the presence of” includes determining the amount of something present, as well as determining whether it is present or absent.

[0101] The terms “subject,” “individual,” or “patient” are often used interchangeably herein. A “subject” can be a biological entity containing expressed genetic materials. The biological entity can be a plant, animal, or microorganism, including, for example, bacteria, viruses, fungi, and protozoa. The subject can be tissues, cells and their progeny of a biological entity obtained in vivo or cultured in vitro. The subject can be a mammal. The mammal can be a human. In some embodiments, the mammal is a mouse, rat, simian, canine, feline, bovine, equine, or ovine. The subject may be diagnosed or suspected of being at high risk for a disease. The disease can be cancer. In some cases, the subject is not necessarily diagnosed or suspected of being at high risk for the disease or the condition.

[0102] As used herein, the terms “cancer” and “cancerous” refer to or describe the physiological condition in a subject that is typically characterized by unregulated cell growth. Examples of cancer include, but are not limited to, melanoma, carcinoma, lymphoma, blastoma, sarcoma, and leukemia and metastases thereof. The term “metastasis” refers to the transference of disease-producing organisms or of malignant or cancerous cells to other parts of the body by way of the blood or lymphatic vessels or membranous surfaces. Non-limiting examples of such cancers include small-cell lung cancer, non-small cell lung cancer, adenocarcinoma of the lung, squamous carcinoma of the lung, melanoma, squamous cell cancer, cancer of the peritoneum, hepatocellular cancer, gastrointestinal cancer, pancreatic cancer, glioblastoma, cervical cancer, ovarian cancer, liver cancer, bladder cancer, hepatoma, breast cancer, colon cancer, colorectal cancer, endometrial or uterine carcinoma, salivary gland carcinoma, kidney cancer, liver cancer, prostate cancer, thyroid cancer, hepatic carcinoma and various types of head and neck cancer.

[0103] As used herein, the phrase “stage of disease” refers to the stages of cancer progression referred to as Stage I, II, III, or IV. Stage of disease indicates if metastasis has occurred in the subject.

[0104] As used herein, the terms “treatment” or “treating” are used in reference to a pharmaceutical or other intervention regimen for obtaining beneficial or desired results in the recipient. Beneficial or desired results include but are not limited to a therapeutic benefit and/or a prophylactic benefit. A therapeutic benefit may refer to eradication or amelioration of symptoms or of an underlying disorder being treated. Also, a therapeutic benefit can be achieved with the eradication or amelioration of one or more of the physiological symptoms associated with the underlying disorder such that an improvement is observed in the subject, notwithstanding that the subject may still be afflicted with the underlying disorder. A prophylactic effect includes delaying, preventing, or eliminating the appearance of a disease or condition, delaying or eliminating the onset of symptoms of a disease or condition, slowing, halting, or reversing the progression of a disease or condition, or any combination thereof. For prophylactic benefit, a subject at risk of developing a particular disease, or to a subject reporting one or more of the physiological symptoms of a disease may undergo treatment, even though a diagnosis of this disease may not have been made.

[0105] The term “protein” or “polypeptide” or “peptide” may be used interchangeably herein and refers to a molecule comprising at least three amino acid residues. As used herein, the term “protein” or “polypeptide” or “peptide” includes glycopeptides unless stated otherwise.

[0106] The term “polysaccharide” is used to describe any polymer made up of subunit monosaccharides, oligomers, or modified monosaccharides. In some embodiments, the polymer may be a homopolymer or a heteropolymer. The linkages between the subunits may include but are not limited to acetal linkages, such as glycosidic bonds; ester linkages such as phosphodiester linkages; amide linkages; and ether linkages.

[0107] The term “glycan” is used to describe a carbohydrate residue of a glycoconjugate, such as the carbohydrate portion of a glycopeptide, glycoprotein, glycolipid or proteoglycan. Glycan structures may be described by a glycan reference code number.

[0108] As used herein, the term “glycoform” refers to a unique primary, secondary, tertiary and quaternary structure of a protein with an attached glycan of a specific structure.

[0109] As used herein, the term “glycopeptide” or “glycopolypeptide” refers to a polypeptide having at least one glycan residue bonded thereto.

[0110] As used herein, the phrase “glycosylated peptides” or “glycosylated polypeptides” refers to a polypeptide bonded to a glycan residue.

[0111] As used herein, the term “glycoprotein,” refers to a protein having at least one glycan residue bonded thereto. In some examples, a glycoprotein is a protein with at least one oligosaccharide chain covalently bonded thereto. Examples of glycoproteins, include but are not limited to apolipoprotein C-III (APOC3), alpha-1-antichymotrypsin (AACT), afamin (AFAM), alpha-1-acid glycoprotein 1 & 2 (AGP12), apolipoprotein B-100 (APOB), apolipoprotein D (APOD), complement C1s subcomponent (C1S), calpain-3 (CAN3), clusterin (CLUS), complement component C8AChain (CO8A), alpha-2-HS-glycoprotein (FETUA), haptoglobin (HPT), immunoglobulin heavy constant gamma 1 (IgG1), immunoglobulin J chain (IgJ), plasma kallikrein (KLKB1), serum paraoxonase/arylesterase 1 (PON1), prothrombin (THRB), serotransferrin (TRFE), protein unc-13 homologA (UN13A), and zinc-alpha-2-glycoprotein (ZA2G). A glycopeptide, as used herein, refers to a fragment of a glycoprotein, unless specified otherwise to the contrary.

[0112] As used herein, the phrase “glycopeptide fragment,” “glycosylated peptide fragment,” “glycopolypeptide fragment”, and “glycosylated polypeptide fragment” refer to a glycosylated polypeptide or glycopeptide having an amino acid sequence that is the same as part (but not all) of the amino acid sequence of the glycosylated protein from which the glycosylated peptide is obtained by digestion, e.g., with one or more protease(s) or by fragmentation, e.g., ion fragmentation within a MRM-MS instrument. MRM refers to multiple-reaction-monitoring. Unless specified otherwise, “glycopeptide fragments” or “fragments of a glycopeptide” refer to the fragments produced directly by using a mass spectrometer optionally after the glycoprotein has been digested enzymatically to produce the glycopeptides.

[0113] As used herein, the phrase “multiple reaction monitoring mass spectrometry (MRM-MS),” refers to a highly sensitive and selective method for the targeted quantification of glycans and peptides in biological samples. Unlike traditional mass spectrometry, MRM-MS is highly selective (targeted), allowing researchers to fine tune an instrument to specifically look for certain peptides fragments of interest. MRM allows for greater sensitivity, specificity, speed and quantitation of peptides fragments of interest, such as a potential biomarker. MRM-MS involves using one or more of a triple quadrupole (QQQ) mass spectrometer and a quadrupole time-of-flight (qTOF) mass spectrometer.

[0114] As used herein, the phrase “digesting a glycopeptide,” refers to a biological process that employs enzymes to break specific amino acid peptide bonds. For example, digesting a glycopeptide includes contacting a glycopeptide with a digesting enzyme, e.g., trypsin, to produce fragments of the glycopeptide. In some examples, a protease enzyme is used to digest a glycopeptide. The term “protease” refers to an enzyme that performs proteolysis or breakdown of large peptides into smaller polypeptides or individual amino acids. Examples of a protease include, but are not limited to, one or more of a serine protease, threonine protease, cysteine protease, aspartate protease, glutamic acid protease, metalloprotease, asparagine peptide lyase, and any combinations of the foregoing.

[0115] As used herein, the phrase “fragmenting a glycopeptide,” refers to the ion fragmentation process which occurs in an MRM-MS instrument. Fragmenting may produce various fragments having the same mass but varying with respect to their charge.

[0116] As used herein, the phrase “multiple-reaction-monitoring (MRM) transition,” refers to the mass to charge (m/z) peaks or signals observed when a glycopeptide, or a fragment thereof, is detected by MRM-MS. The MRM transition is detected as the transition of the precursor and product ion.

[0117] As used herein, the phrase “detecting a multiple-reaction-monitoring (MRM) transition,” refers to the process in which a mass spectrometer analyzes a sample using tandem mass spectrometer ion fragmentation methods and identifies the mass to charge ratio for ion fragments in a sample. The absolute value of these identified mass to charge ratios are referred to as transitions. In the context of the methods set forth herein, the mass to charge ratio transitions are the values indicative of glycan, peptide or glycopeptide ion fragments. For some glycopeptides set forth herein, there is a single transition peak or signal. For some other glycopeptides set forth herein, there is more than one transition peak or signal. Background information on MRM mass spectrometry can be found in Introduction to Mass Spectrometry: Instrumentation, Applications, and Strategies for Data Interpretation, 4th Edition, J. Throck Watson, O. David Sparkman, ISBN: 978-0-470-51634-8, November 2007, the entire contents of which are here incorporated by reference in its entirety for all purposes.

[0118] As used herein, the phrase “detecting a multiple-reaction-monitoring (MRM) transition indicative of a glycopeptide,” refers to a MS process in which an MRM-MS transition is detected and then compare to a calculated mass to charge ratio (m/z) of a glycopeptide, or fragment thereof, in order to identify the glycopeptide. In some examples, herein, a single transition may be indicative of two more glycopeptides, if those glycopeptides have identical MRM-MS fragmentation patterns. A transition peak or signal includes, but is not limited to, those transitions set forth herein were are associated with a glycopeptide consisting essentially of an amino acid sequence selected from SEQ ID NO: 101-131, 159-207, and 21-46, and combinations thereof, according to Tables 1-5. A transition peak or signal includes, but is not limited to, those transitions set forth herein were are associated with a glycopeptide consisting of an amino acid sequence selected from SEQ ID NO: 101-131, 159-207, and 21-46, and combinations thereof, according to Tables 1-5.

[0119] As used herein, the term “reference value” refers to a value obtained from a population of individual(s) whose disease state is known. The reference value may be in n-dimensional feature space and may be defined by a maximum-margin hyperplane. A reference value can be determined for any particular population, subpopulation, or group of individuals according to standard methods well known to those of skill in the art.

[0120] As used herein, the term “population of individuals” means one or more individuals. In one embodiment, the population of individuals consists of one individual. In one embodiment, the population of individuals comprises multiple individuals. As used herein, the term “multiple” means at least 2 (such as at least 4, 6, 8, 10, 12, 14, 16, 18, 20, 22, 24, 26, 28, or 30) individuals. In one embodiment, the population of individuals comprises at least 10 individuals.

[0121] Glycans are referenced herein using the Symbol Nomenclature for Glycans (SNFG) for illustrating glycans. An explanation of this illustration system is available on the internet at www.ncbi.nlm.nih.gov/glycans/snfg.html, the entire contents of which are herein incorporated by reference in its entirety for all purposes. Symbol Nomenclature for Graphical Representation of Glycans as published in Glycobiology 25: 1323-1324, 2015. Additional information showing illustrations of the SNFG system are. Within this system, the term, Hex_i: is interpreted as follows: i indicates the number of green circles (mannose) and the number of yellow circles (galactose). The term, HexNAC_j, uses j to indicate the number of blue squares (G1cNAC's). The term Fuc_d, uses d to indicate the number of red triangles (fucose). The term Neu₅AC_1, uses 1 to indicate the number of purple diamonds (sialic acid). The glycan reference codes used herein combine these i, j, d, and l terms to make a composite 4-5 number glycan reference code, e.g., 5300 or 5320. See, for example, FIGS. 1 through 14 of PCT Patent Application No. PCT/US2020/0162861, filed Jan. 31, 2020, which are herein incorporated by reference in their entirety for all purposes.

[0122] The term “in vivo” is used to describe an event that takes place in a subject's body.

[0123] The term “ex vivo” is used to describe an event that takes place outside of a subject's body. An “ex vivo” assay is not performed on a subject. Rather, it is performed upon a sample separate from a subject. An example of an “ex vivo” assay performed on a sample is an “in vitro” assay.

[0124] The term “in vitro” is used to describe an event that takes places contained in a container for holding laboratory reagent such that it is separated from the living biological source organism from which the material is obtained. In vitro assays can encompass cell-based assays in which cells alive or dead are employed. In vitro assays can also encompass a cell-free assay in which no intact cells are employed.

[0125] As used herein, the term ‘about’ a number refers to that number plus or minus 10% of that number. The term ‘about’ a range refers to that range minus 10% of its lowest value and plus 10% of its greatest value.

### III. Overview of Exemplary Workflow

[0126] FIG. 1 is a schematic diagram of an exemplary workflow 100 for the detection of peptide structures associated with a condition for use in treatment management in accordance with one or more embodiments. Workflow 100 may include various operations including, for example, sample collection 102, sample intake 104, sample preparation and processing 106, data analysis 108, and output generation 110.

[0127] Sample collection 102 may include, for example, obtaining a biological sample 112 of one or more subjects, such as subject 114. Biological sample 112 may take the form of a specimen obtained via one or more sampling methods. Biological sample 112 may be representative of subject 114 as a whole or of a specific tissue, cell type, or other category or sub-category of interest. Biological sample 112 may be obtained in any of a number of different ways. In various embodiments, biological sample 112 includes whole blood sample 116 obtained via a blood draw. In other embodiments, biological sample 112 includes set of aliquoted samples 118 that includes, for example, a serum sample, a plasma sample, a blood cell (e.g., white blood cell (WBC), red blood cell (RBC) sample, another type of sample, or a combination thereof. Biological samples 112 may include nucleotides (e.g., ssDNA, dsDNA, RNA), organelles, amino acids, peptides, proteins, carbohydrates, glycoproteins, or any combination thereof.

[0128] Sample intake 104 may include one or more various operations such as, for example, aliquoting, registering, processing, storing, thawing, and/or other types of operations. In one or more embodiments, when biological sample 112 includes whole blood sample 116, sample intake 104 includes aliquoting whole blood sample 116 to form a set of aliquoted samples that can then be sub-aliquoted to form set of samples 120.

[0129] Sample preparation and processing 106 may include, for example, one or more operations to form set of peptide structures 122. In various embodiments, set of peptide structures 122 may include various fragments of unfolded proteins that have undergone digestion and may be ready for analysis.

[0130] Further, sample preparation and processing 106 may include, for example, data acquisition 124 based on set of peptide structures 122. For example, data acquisition 124 may include use of, for example, but is not limited to, a liquid chromatography/mass spectrometry (LC/MS) system.

[0131] Data analysis 108 may include, for example, peptide structure analysis 126. In some embodiments, data analysis 108 also includes output generation 110. In other embodiments, output generation 110 may be considered a separate operation from data analysis 108. Output generation 110 may include, for example, generating final output 128 based on the results of peptide structure analysis 126. Final output 128 may be used for the research, and/or treatment of disease, such as, for example, melanoma.

[0132] In various embodiments, final output 128 is comprised of one or more outputs. Final output 128 may take various forms. For example, final output 128 may be a report that includes, for example, a treatment output (e.g., a treatment design output, a treatment plan output, or combination thereof). In some embodiments, final output 128 may be an alert (e.g., a visual alert, an audible alert, etc.), a notification (e.g., a visual notification, an audible notification, an email notification, etc.), an email output, or a combination thereof. In some embodiments, final output 128 may be sent to remote system 130 for processing. Remote system 130 may include, for example, a computer system, a server, a processor, a cloud computing platform, cloud storage, a laptop, a tablet, a smartphone, some other type of mobile computing device, or a combination thereof.

[0133] In other embodiments, workflow 100 may optionally exclude one or more of the operations described herein and/or may optionally include one or more other steps or operations other than those described herein (e.g., in addition to and/or instead of those described herein). For example, in one or more embodiments, final output 128 may not be sent to remote system 130 for processing. Instead, a notification or a communication (e.g., email) may be sent to remote system 130 to notify a user(s) or entity that final output 128 is available for retrieval (e.g., download). Accordingly, workflow 100 may be implemented in any of a number of different ways for use in the research and/or treatment of melanoma.

### I. Detection and Quantification of Peptide Structures

[0134] FIGS. 2A and 2B are schematic diagrams of a workflow for sample preparation and processing 106 in accordance with one or more embodiments. FIGS. 2A and 2B are described with continuing reference to FIG. 1. Sample preparation and processing 106 may include, for example, preparation workflow 200 shown in FIG. 2A and data acquisition 124 shown in FIG. 2B.

[0135] I.A. Sample Preparation and Processing

[0136] FIG. 2A is a schematic diagram of preparation workflow 200 in accordance with one or more embodiments. Preparation workflow 200 may be used to prepare a sample, such as a sample of set of samples 120 in FIG. 1, for analysis via data acquisition 124. For example, this analysis may be performed via mass spectrometry. In various embodiments, preparation workflow 200 may include denaturation and reduction 202, alkylation 204, and digestion 206.

[0137] In general, polymers, such as proteins, in their native form, can fold to include secondary, tertiary, and/or other higher order structures. Such higher order structures may functionalize proteins to complete tasks (e.g., enable enzymatic activity) in a subject. Further, such higher order structures of polymers may be maintained via various interactions between side chains of amino acids within the polymers. Such interactions can include ionic bonding, hydrophobic interactions, hydrogen bonding, and disulfide linkages between cysteine residues. However, when using analytic systems and methods, including mass spectrometry, unfolding such polymers (e.g., peptide/protein molecules) may be desired to obtain sequence information. In some embodiments, unfolding a polymer may include denaturing the polymer, which may include, for example, linearizing the polymer.

[0138] In one or more embodiments, denaturation and reduction 202 can be used to disrupt higher order structures (e.g., secondary, tertiary, quaternary, etc.) of one or more proteins (e.g., polypeptides and peptides) in a sample (e.g., one of set of samples 120 in FIG. 1). Denaturation and reduction 202 may include, for example, a denaturation procedure and a reduction procedure. In some embodiments, the denaturation procedure may be performed using, for example, thermal denaturation, where heat is used as a denaturing agent. The thermal denaturation can disrupt ionic bonding, hydrophobic interactions, and/or hydrogen bonding.

[0139] In one or more embodiments, the denaturation procedure may include using one or more denaturing agents in combination with heat. These one or more denaturing agents may include, for example, but are not limited to, any number of chaotropic salts (e.g., urea, guanidine), surfactants (e.g., sodium dodecyl sulfate (SDS), beta octyl glucoside, Triton X-100), or combination thereof. In some cases, such denaturing agents may be used in combination with heat when sample preparation workflow further includes a cleanup procedure.

[0140] The resulting one or more denatured (e.g., unfolded, linearized) proteins may then undergo further processing in preparation of analysis. For example, a reduction procedure may be performed in which one or more reducing agents are applied. A reducing agent may take the form of, for example, without limitation, dithiothreitol (DTT), tris(2-carboxyethyl)phosphine (TCEP), or some other reducing agent. The reducing agent may reduce (e.g., cleave) the disulfide linkages between cysteine residues of the one or more denatured proteins to form one or more reduced proteins.

[0141] In various embodiments, the one or more reduced proteins resulting from denaturation and reduction 202 may undergo a process to prevent the reformation of disulfide linkages between, for example, the cysteine residues of the one or more reduced proteins. This process may be implemented using alkylation 204 to form one or more alkylated proteins. For example, alkylation 204 may be used add an acetamide group to a sulfur on each cysteine residue to prevent disulfide linkages from reforming. In various embodiments, an acetamide group can be added by reacting one or more alkylating agents with a reduced protein. The one or more alkylating agents may include, for example, one or more acetamide salts. An alkylating agent may take the form of, for example, iodoacetamide (IAA), 2-chloroacetamide, some other type of acetamide salt, or some other type of alkylating agent.

[0142] In some embodiments, alkylation 204 may include a quenching procedure. The quenching procedure may be performed using one or more reducing agents (e.g., one or more of the reducing agents described above).

[0143] In various embodiments, the one or more alkylated formed via alkylation 204 can then undergo digestion 206 in preparation for analysis (e.g., mass spectrometry analysis). Digestion 206 of a protein may include cleaving the protein at or around one or more cleavage sites (e.g., site 205 which may be one or more amino acid residues). For example, without limitation, an alkylated protein may be cleaved at the carboxyl side of the lysine or arginine residues. This type of cleavage may break the protein into various segments, which include one or more peptide structures (e.g., glycosylated or aglycosylated).

[0144] In various embodiments, digestion 206 is performed using one or more proteolysis catalysts. For example, an enzyme can be used in digestion 206. In some embodiments, the enzyme takes the form of trypsin. In other embodiments, one or more other types of enzymes (e.g., proteases) may be used in addition to or in place of trypsin. These one or more other enzymes include, but are not limited to, LysC, LysN, AspN, GluC, and ArgC. In some embodiments, digestion 206 may be performed using tosyl phenylalanyl chloromethyl ketone (TPCK)-treated trypsin, one or more engineered forms of trypsin, one or more other formulations of trypsin, or a combination thereof. In some embodiments, digestion 206 may be performed in multiple steps, with each involving the use of one or more digestion agents. For example, a secondary digestion, tertiary digestion, etc. may be performed. In one or more embodiments, trypsin is used to digest serum samples. In one or more embodiments, trypsin/LysC cocktails are used to digest plasma samples.

[0145] In one or more embodiments, digestion 206 further includes a quenching procedure. The quenching procedure may be performed by acidifying the sample (e.g., to a pH<3). In one or more embodiments, formic acid may be used to perform this acidification.

[0146] In various embodiments, preparation workflow 200 further includes post-digestion procedure 207. Post-digestion procedure 207 may include, for example, a cleanup procedure. The cleanup procedure may include, for example, the removal of unwanted components in the sample that results from digestion 206. For example, unwanted components may include, but are not limited to, inorganic ions, surfactants, etc. In some embodiments, post-digestion procedure 207 further includes a procedure for the addition of heavy-labeled peptide internal standards.

[0147] Although preparation workflow 200 has been described with respect to a sample created or taken from biological sample 112 that is blood-based (e.g., a whole blood sample, a plasma sample, a serum sample, etc.), sample preparation workflow 200 may be similarly implemented for other types of samples (e.g., tears, urine, tissue, interstitial fluids, sputum, etc.) to produce set of peptides structures 122.

[0148] I.B. Peptide Structure Identification and Quantitation

[0149] FIG. 2B is a schematic diagram of data acquisition 124 in accordance with one or more embodiments. In various embodiments, data acquisition 124 can commence following sample preparation 200 described in FIG. 2A. In various embodiments, data acquisition 124 can comprise quantification 208, quality control 210, and peak integration and normalization 212.

[0150] In various embodiments, targeted quantification 208 of peptides and glycopeptides can incorporate use of liquid chromatography-mass spectrometry LC/MS instrumentation. For example, LC-MS/MS, or tandem MS may be used. In general, LC/MS (e.g., LC-MS/MS) can combine the physical separation capabilities of liquid chromatograph (LC) with the mass analysis capabilities of mass spectrometry (MS). According to some embodiments described herein, this technique allows for the separation of digested peptides to be fed from the LC column into the MS ion source through an interface.

[0151] In various embodiments, any LC/MS device can be incorporated into the workflow described herein. In various embodiments, a Triple Quadrupole LC/MS™ includes example instruments suited for identification and targeted quantification 208. In various embodiments, targeted quantification 208 is performed using multiple reaction monitoring mass spectrometry (MRM-MS).

[0152] In various embodiments described herein, identification of a particular protein or peptide and an associated quantity can be assessed. In various embodiments described herein, identification of a particular glycan and an associated quantity can be assessed. In various embodiments described herein, particular glycans can be matched to a glycosylation site on a protein or peptide and their absolute or relative quantities assessed.

[0153] In some cases, targeted quantification 208 includes using a specific collision energy associated for the appropriate fragmentation to consistently see an abundant product ion. Glycopeptide structures may have a lower collision energy than aglycosylated peptide structures. When analyzing a sample that includes glycopeptide structures, the source voltage and gas temperature may be lowered as compared to generic proteomic analysis.

[0154] In various embodiments, quality control 210 procedures can be put in place to optimize data quality. In various embodiments, measures can be put in place allowing only errors within acceptable ranges outside of an expected value. In various embodiments, employing statistical models (e.g. using Westgard rules) can assist in quality control 210. For example, quality control 210 may include, for example, assessing the retention time and abundance of representative peptide structures (e.g., glycosylated and/or aglycosylated) and spiked-in internal standards, in either every sample, or in each quality control sample (e.g., pooled serum digest).

[0155] Peak integration and normalization 212 may be performed to process the data that has been generated and transform the data into a format for analysis. For example, peak integration and normalization 212 may include converting abundance data for various product ions that were detected for a selected peptide structure into a single quantification metric (e.g., a relative quantity, an adjusted quantity, a normalized quantity, a relative concentration, an adjusted concentration, a normalized concentration, etc.) for that peptide structure. In some embodiments, peak integration and normalization 212 may be performed using one or more of the techniques described in U.S. Patent Publication No. 2020/0372973A1 and/or US Patent Publication No. 2020/0240996, the disclosures of which are incorporated by reference herein in their entireties.

### II. Peptide Structure Data Analysis and Melanoma Treatment Management

[0156] II.A. Exemplary System

[0157] II.A.1. System for Analyzing Peptide Structure Data and Managing Melanoma Treatment

[0158] FIG. 3 is a block diagram of an analysis system 300 in accordance with one or more embodiments. Analysis system 300 can be used to both detect and analyze various peptide structures that have been associated with melanoma treatments. Analysis system 300 is one example of an implementation for a system that may be used to perform data analysis 108 in FIG. 1. Thus, analysis system 300 is described with continuing reference to workflow 100 as described in FIGS. 1, 2A, and/or 2B.

[0159] Analysis system 300 may include computing platform 302 and data store 304. In some embodiments, analysis system 300 also includes display system 306. Computing platform 302 may take various forms. In one or more embodiments, computing platform 302 includes a single computer (or computer system) or multiple computers in communication with each other. In other examples, computing platform 302 takes the form of a cloud computing platform. In still other examples, computing platform 302 may include any number of or combination computers, cloud computing platforms, servers, or mobile devices.

[0160] Data store 304 and display system 306 may each be in communication with computing platform 302. In some examples, data store 304, display system 306, or both may be considered part of or otherwise integrated with computing platform 302. Thus, in some examples, computing platform 302, data store 304, and display system 306 may be separate components in communication with each other, but in other examples, some combination of these components may be integrated together. Communication between these different components may be implemented using any number of wired communications links, wireless communications links, optical communications links, or a combination thereof.

[0161] Analysis system 300 includes, for example, treatment management system 308, which may be implemented using hardware, software, firmware, or a combination thereof. In one or more embodiments, peptide structure analyzer 308 is implemented using computing platform 302.

[0162] Treatment management system 308 may be used to manage the treatment of a subject diagnosed with a melanoma condition (i.e., malignant melanoma). Treatment management system 308 may be used to predict the subject's response to one or more treatments for the melanoma condition, select a treatment to be administered to the subject to prevent the progression (or advancement) of the melanoma condition and/or otherwise improve the condition of the subject, and/or otherwise plan the treatment of the subject.

[0163] Treatment management system 308 receives peptide structure data 310 for processing. Peptide structure data 310 may have been generated using multiple reaction monitoring mass spectrometry. Peptide structure data 310 may be, for example, the peptide structure data that is output from sample preparation and processing 106 in FIGS. 1, 2A, and 2B. Accordingly, peptide structure data 310 may correspond to set of peptide structures 122 identified for biological sample 112 and may thereby correspond to biological sample 112. Further, as set of peptide structures 122 corresponds to a set of glycoproteins (e.g., each peptide structure of set of peptide structures 122 being derived from a corresponding glycoprotein), peptide structure data 310 therefore corresponds to the set of glycoproteins. In some cases, two or more peptide structures may correspond to a same glycoprotein and these two or more peptide structures may be referred to as glycoforms of that same glycoprotein.

[0164] Peptide structure data 310 can be sent as input into treatment management system 308, retrieved from data store 304 or some other type of storage (e.g., cloud storage), accessed from cloud storage, or obtained in some other manner. In some cases, peptide structure data 310 may be retrieved from data store 304 in response to (e.g., directly or indirectly based on) receiving user input entered by a user via an input device.

[0165] Treatment management system 308 may include scoring system 312. In one or more embodiments, treatment management system 308 further includes and treatment planning system 314. Scoring system 312 may be used to predict the response of a subject (e.g., subject 114) to one or more types of treatment. Treatment planning system 314 may be used to plan how to treat the subject based on the predicted response(s) for the subject.

[0166] Scoring system 312 may include, for example, model system 315 that is configured to receive peptide structure data 310 for processing. Model system 315 may be implemented in any of a number of different ways. Model system 315 may be a computational model system that may be implemented using any number of models, functions, equations, algorithms, and/or other mathematical techniques.

[0167] In one or more embodiments, scoring system 312 receives peptide structure data 310 for processing and inputs quantification data 316 identified from peptide structure data 310 for set of peptide structures 318 into model system 315. Model system 315 analyzes quantification data 316 to generate set of treatment scores 320 corresponding to a set of treatments. Peptide structure data 310 may comprise a set of quantification metrics for each peptide structure of, for example, set of peptide structures 122 in FIG. 1. A quantification metric for a peptide structure may be comprised of at least one of a relative abundance, a normalized abundance, an adjusted abundance, an absolute abundance, a relative quantity, an adjusted quantity, a normalized quantity, a relative concentration, an adjusted concentration, or a normalized concentration. Accordingly, quantification data 316 may include one or more quantification metrics for each peptide structure of set of peptide structures 318.

[0168] A peptide structure of set of peptide structures 318 may be a glycosylated peptide structure, or glycopeptide structure, that is defined by a peptide sequence and a glycan structure attached to a linking site of the peptide sequence quantity. For example, the peptide structure may be a glycopeptide or a portion of a glycopeptide. Alternatively, a peptide structure of set of peptide structures 318 may be an aglycosylated peptide structure that is defined by a peptide sequence. For example, the peptide structure may be a peptide or a portion of a peptide and may be referred to as a quantification peptide.

[0169] Set of peptide structures 318 may be identified as being those most predictive or relevant to the response of a subject to a corresponding treatment(s) based on training of model 312. In one or more embodiments, set of peptide structures 318 includes at least one, at least three, at least five, or at least some other number of the peptide structures identified in Table 1 below in Section V.B. The number of peptide structures selected from Table 1 for inclusion in set of peptide structures 318 may be based on, for example, a desired level of accuracy, the number of treatments for which set of treatment scores 320 are being generated, one or more other factors, or a combination thereof.

[0170] In one or more embodiments, model system 315 may be used to analyze the response of a subject to a pembrolizumab treatment (“pembro”), the response of the subject to a combination treatment comprised of the combination of nivolumab and ipilimumab (“ipi/nivo”). Both pembro and ipi/nivo are treatments used to treat melanoma. For example, model system 315 may use quantification data 316 for set of peptide structures 318 to generate set of treatment scores 320 that includes a first treatment score 322 for pembro and a second treatment score 324 for ipi/nivo. In one or more embodiments, set of peptide structures 318 may include first subset 321 of set of peptide structures 318 used to compute first treatment score 322 and second subset 323 of set of peptide structures 318 used to compute second treatment score 324. In one or more embodiments, first subset 321 and the second subset 323 of set of peptide structures 318 may partially overlap (e.g., have one, two, three, four, five, some other number of peptide structures in common.

[0171] First portion 326 of quantification data 316 used to compute first treatment score 322 may correspond to first subset 321. Second portion 328 of quantification data 316 used to compute second treatment score 324 may correspond to second subset 323. First portion 326 and second portion 328 may be referred to as first quantification data and second quantification data, respectively. When first subset 321 and second subset 323 partially overlap, first portion 326 and second portion 328 similarly overlap. As one example, first portion 326 of quantification data 316 corresponding to first portion 321 used to compute first treatment score 322 and second portion 328 of quantification data 316 corresponding to second subset 323 of set of peptide structures 318 used to compute second treatment score 324 may have two peptide structures in common.

[0172] In one or more embodiments, first subset 321 of set of peptide structures 318 includes at least one, at least three, at least five, or at least some other number of the peptide structures identified in Table 2 below in Section V.B. In one or more embodiments, second subset 323 of set of peptide structures 318 includes at least one, at least three, at least five, or at least some other number of the peptide structures identified in Table 3 below in Section V.B.

[0173] In one or more embodiments, set of peptide structures 318 may have been identified by treatment management system 308 using relevance system 330. Relevance system 330 may include any number of computational models to analyze sample data 332 to determine which peptide structures to include in set of peptide structures 318. Sample data 332 may be retrieved from data store 304 or received in some other manner. Sample data 332 may include data capturing multiple subjects' responses to one or more treatments. For example, sample data 332 may include data capturing subjects' responses to pembro and to subjects' responses to ipi/nivo.

[0174] In one or more embodiments, relevance system 330 includes a first algorithm that uses a Wilcoxon rank-sum test to determine first subset 321 and a second algorithm that uses the Wilcoxon rank-sum test to determine second subset 323. For example, relevance system 330 includes a first algorithm that uses a Wilcoxon rank-sum test to determine which peptide structures to include in first subset 321 to compute first treatment score 322 (e.g., for pembro) and a second algorithm that uses the Wilcoxon rank-sum test to determine which peptide structures to include in second subset 323 to compute second treatment score 324 (e.g., for ipi/nivo).

[0175] Treatment planning system 314 receives set of treatment scores 320 from scoring system 312. Treatment planning system 314 uses set of treatment scores 320 to generate treatment output 334. Treatment output 334 may include, for example, an identification or categorization of the response of the subject to the one or more treatments for which the subject's response is being predicted, at least one of an identification of a therapeutic to treat the subject, a design for the therapeutic, a treatment plan for administering the therapeutic, or a combination thereof. In some embodiments, the therapeutic is an immune checkpoint inhibitor. In various embodiments, treatment output 326 includes a therapeutic dosage for each therapeutic to be used in treating the subject.

[0176] In one or more embodiments, treatment output 334 identifies a response classification that indicates a predicted response for the subject to a treatment. For example, set of treatment scores 320 may include a treatment score that can be used to classify a subject's response to a melanoma treatment as either early disruption or sustained control.

[0177] The response classification may be, for example, a positive response classification, a negative response classification, or some other type of response classification. A positive response classification may, for example, indicate that the subject is predicted to have a relatively positive or otherwise successful response to treatment. A negative response classification may, for example, indicate that the subject is predicted to have a relatively poor or otherwise unsuccessful response to treatment. In one or more embodiments, the response classification predicts response to treatment with respect to survivability (e.g., overall survival, progression-free survival, etc.).

[0178] “Early disruption” may be an example of a negative response classification. “Early disruption” may indicate that the subject is predicted to have a relatively poor response to the treatment. For example, a prediction of “early disruption” may mean that the subject is predicted to have a disruption event within an initial period of time (e.g., 6 months) after treatment. A disruption event may be any event that disrupts the subject's “progression-free survival” (PFS). A disruption event may be also referred to as a progression event or an advancement event as such an event indicates disease progression or advancement. In some cases, the progression event may be a final level of progression or disease advancement, such as death. Thus, “early disruption” may also be referred to as “progression,” “disease progression,” or “disease advancement.” A disruption event may include, for example, at least one of a new melanoma (e.g., malignant mole), an increase in the size of an existing melanoma, or some other type of event. A disruption event may be detected using any number of progression criteria. For example, a disruption event may be considered “detected” in response to a selected number or proportion of a set of progression criteria being met. The set of progression criteria may include, for example, but is not limited to, one or more immune-related response criteria (irRC), one or more response evaluation criteria in solid tumors (RECIST), one or more other types of criteria, or a combination thereof.

[0179] “Sustained control” may be one example of a positive response classification. “Sustained control” may be a response classification that indicates that the subject is predicted to have a relatively successful response to the treatment. For example, a prediction of “sustained control” may mean that the subject is predicted to have no disruption events within a sustained period of time (e.g., 12 months) after treatment. The sustained period of time may be longer than the initial period of time.

[0180] In one or more embodiments, treatment planning system 314 uses one or more selected thresholds to classify set of treatment scores 320. In one or more embodiments, a different selected threshold is used for each treatment. In other embodiments, a same threshold is used for all treatments being considered. For example, treatment planning system 314 may use selected threshold 336. In one or more embodiments, selected threshold is 0.5. In other embodiments, selected threshold is 0.6, 0.7, 0.75, 0.8, or some other threshold.

[0181] As one example, when selected threshold is 0.5, treatment planning system 314 may generate a first predicted response based on a determination that a treatment score is above (or is at and above) the selected threshold and may generate a second predicted response based on a determination that the treatment score is not above (or is below) the selected threshold. The first predicted response may be, for example, a first predicted response classification (e.g., sustained control); the second predicted response may be a second predicted response classification (e.g., early disruption).

[0182] Treatment output 334 may include the response classification that is predicted such that a user (e.g., a medical professional) can determine whether a corresponding treatment should be or should not be administered to a subject. For example, when first treatment score 322 is generated for pembro, and treatment output 334 indicates that a subject's predicted response is “early disruption,” a medical professional may determine to administer a different treatment, a higher dosage of pembro, or change the treatment plan for the subject in some other way.

[0183] When set of treatment scores 320 includes at least two treatment scores, treatment planning system 314 may analyze the at least two treatment scores and determine which treatment score indicates a best response to the corresponding treatment for the subject. As one example, treatment planning system 314 may compare the at least treatment scores and select the treatment corresponding to the highest treatment score for the subject. This selected treatment may then be identified in treatment output 334. In some cases, treatment output 334 may further include a therapeutic dosage (e.g., an approved dosage) for selected treatment for the subject. In some cases, treatment output 334 may further include a response classification for the selected treatment. For example, while first treatment score 322 may be higher than second treatment score 324, both first treatment score 322 and second treatment score 324 may indicate that the predicted response for the subject is “early disruption” with both treatments. In this example, treatment output 336 may identify the treatment corresponding to first treatment score 322 with an indication that the predicted response “early disruption” and a recommendation to either select a different treatment, alter (e.g., increase/decrease) a dosage of the treatment corresponding to first treatment score 322, combine the treatment with at least one other treatment, or change the treatment plan for the subject in some other manner.

[0184] Treatment output 334 may be sent to remote system 130 for processing in some examples. In other embodiments, treatment output 334 may be displayed on graphical user interface 338 in display system 306 for viewing by a human operator. The human operator may use treatment output 334 to manage the melanoma treatment of the subject.

[0185] II.A.2. Computer Implemented System

[0186] FIG. 4 is a block diagram of a computer system in accordance with various embodiments. Computer system 400 may be an example of one implementation for computing platform 302 described above in FIG. 3.

[0187] In one or more examples, computer system 400 can include a bus 402 or other communication mechanism for communicating information, and a processor 404 coupled with bus 402 for processing information. In various embodiments, computer system 400 can also include a memory, which can be a random-access memory (RAM) 406 or other dynamic storage device, coupled to bus 402 for determining instructions to be executed by processor 404. Memory also can be used for storing temporary variables or other intermediate information during execution of instructions to be executed by processor 404. In various embodiments, computer system 400 can further include a read only memory (ROM) 408 or other static storage device coupled to bus 402 for storing static information and instructions for processor 404. A storage device 410, such as a magnetic disk or optical disk, can be provided and coupled to bus 402 for storing information and instructions.

[0188] In various embodiments, computer system 400 can be coupled via bus 402 to a display 412, such as a cathode ray tube (CRT) or liquid crystal display (LCD), for displaying information to a computer user. An input device 414, including alphanumeric and other keys, can be coupled to bus 402 for communicating information and command selections to processor 404. Another type of user input device is a cursor control 416, such as a mouse, a joystick, a trackball, a gesture input device, a gaze-based input device, or cursor direction keys for communicating direction information and command selections to processor 404 and for controlling cursor movement on display 412. This input device 414 typically has two degrees of freedom in two axes, a first axis (e.g., x) and a second axis (e.g., y), that allows the device to specify positions in a plane. However, it should be understood that input devices 414 allowing for three-dimensional (e.g., x, y, and z) cursor movement are also contemplated herein.

[0189] Consistent with certain implementations of the present teachings, results can be provided by computer system 400 in response to processor 404 executing one or more sequences of one or more instructions contained in RAM 406. Such instructions can be read into RAM 406 from another computer-readable medium or computer-readable storage medium, such as storage device 410. Execution of the sequences of instructions contained in RAM 406 can cause processor 404 to perform the processes described herein. Alternatively, hard-wired circuitry can be used in place of or in combination with software instructions to implement the present teachings. Thus, implementations of the present teachings are not limited to any specific combination of hardware circuitry and software.

[0190] The term “computer-readable medium” (e.g., data store, data storage, storage device, data storage device, etc.) or “computer-readable storage medium” as used herein refers to any media that participates in providing instructions to processor 404 for execution. Such a medium can take many forms, including but not limited to, non-volatile media, volatile media, and transmission media. Examples of non-volatile media can include, but are not limited to, optical, solid state, magnetic disks, such as storage device 410. Examples of volatile media can include, but are not limited to, dynamic memory, such as RAM 406. Examples of transmission media can include, but are not limited to, coaxial cables, copper wire, and fiber optics, including the wires that comprise bus 402.

[0191] Common forms of computer-readable media include, for example, a floppy disk, a flexible disk, hard disk, magnetic tape, or any other magnetic medium, a CD-ROM, any other optical medium, punch cards, paper tape, any other physical medium with patterns of holes, a RAM, PROM, and EPROM, a FLASH-EPROM, any other memory chip or cartridge, or any other tangible medium from which a computer can read.

[0192] In addition to computer readable medium, instructions or data can be provided as signals on transmission media included in a communications apparatus or system to provide sequences of one or more instructions to processor 404 of computer system 400 for execution. For example, a communication apparatus may include a transceiver having signals indicative of instructions and data. The instructions and data are configured to cause one or more processors to implement the functions outlined in the disclosure herein. Representative examples of data communications transmission connections can include, but are not limited to, telephone modem connections, wide area networks (WAN), local area networks (LAN), infrared data connections, NFC connections, optical communications connections, etc.

[0193] It should be appreciated that the methodologies described herein, flow charts, diagrams, and accompanying disclosure can be implemented using computer system 400 as a standalone device or on a distributed network of shared computer processing resources such as a cloud computing network.

[0194] The methodologies described herein may be implemented by various means depending upon the application. For example, these methodologies may be implemented in hardware, firmware, software, or any combination thereof. For a hardware implementation, the processing unit may be implemented within one or more application specific integrated circuits (ASICs), digital signal processors (DSPs), digital signal processing devices (DSPDs), programmable logic devices (PLDs), field programmable gate arrays (FPGAs), processors, controllers, micro-controllers, microprocessors, electronic devices, other electronic units designed to perform the functions described herein, or a combination thereof.

[0195] In various embodiments, the methods of the present teachings may be implemented as firmware and/or a software program and applications written in conventional programming languages such as R, C, C++, Python, etc. If implemented as firmware and/or software, the embodiments described herein can be implemented on a non-transitory computer-readable medium in which a program is stored for causing a computer to perform the methods described above. It should be understood that the various engines described herein can be provided on a computer system, such as computer system 400, whereby processor 404 would execute the analyses and determinations provided by these engines, subject to instructions provided by any one of, or a combination of, the memory components RAM 406, ROM, 408, or storage device 410 and user input provided via input device 414.

[0196] II.B. Exemplary Methodologies for Analyzing Peptide Structure Data and Managing Melanoma Treatment

[0197] II.B.1. Predicting Treatment Response

[0198] FIG. 5 is a flowchart of a process for managing a treatment for a subject diagnosed with a melanoma condition in accordance with one or more embodiments. Process 500 may be implemented using, for example, at least a portion of workflow 100 as described in FIGS. 1, 2A, and 2B and/or analysis system 300 as described in FIG. 3. Process 500 may be used to generate, for example, a treatment output such as treatment output 334 in FIG. 3 to aid in the treatment of a subject diagnosed with a melanoma condition (e.g., malignant melanoma).

[0199] Step 502 includes receiving peptide structure data corresponding to a set of glycoproteins in a biological sample obtained from the subject. The peptide structure data may be, for example, one example of an implementation of peptide structure data 310 in FIG. 3. The peptide structure data may have been generated using multiple reaction monitoring mass spectrometry. The peptide structure data may include quantification data for each peptide structure of a plurality of peptide structures. The quantification data may include, for example, one or more quantification metrics for each peptide structure of the plurality of peptide structures. A quantification metric for a peptide structure may include, for example, but is not limited to, at least one of a relative abundance, an absolute abundance, an adjusted abundance, a normalized abundance, a relative quantity, an adjusted quantity, a normalized quantity, a relative concentration, an adjusted concentration, or a normalized concentration. In this manner, the quantification data for a given peptide structure provides an indication of the abundance of the peptide structure in the biological sample.

[0200] Step 504 includes computing a treatment score using quantification data identified from the peptide structure data for a set of peptide structures, wherein the set of peptide structures includes at least one peptide structure identified from a plurality of peptide structures listed in Table 1. In step 504, the set of peptide structures may include, for example, at least two peptide structures from a selected group of peptide structures identified in Table 1 below. The selected group of peptide structures may be, for example, a portion of the peptide structure identified in Table 1. The selected group of peptide structures may be, for example, those peptide structures identified in Table 2 below or those peptide structures identified in Table 3 below. For example, when the treatment being considered includes pembrolizumab, the selected group of peptide structures includes the peptide structures listed in Table 2. When the treatment being considered includes a combination of nivolumab and ipilimumab, the selected group of peptide structures includes the peptide structures listed in Table 3. In step 504, the set of peptide structures may include at least one glycopeptide structure defined by a peptide sequence and a glycan structure linked to a linking site of the peptide sequence, as identified in Table 1.

[0201] In one or more embodiments, the set of peptide structures may have been identified using sample data for a sample population (e.g., subjects diagnosed with melanoma in which at least a portion of the subjects have been treated using the treatment being considered in process 500) and a statistical algorithm that identifies a relative significance for each peptide structure of a collection of peptide structures corresponding to the sample data. The statistical algorithm may include, for example, a Wilcoxon rank-sum test. In one or more embodiments, the identification of the set of peptide structures is performed using process 800 described below in FIG. 8.

[0202] Step 504 may be performed by, for example, computing a proportion of the set of peptide structures having a certain type of abundance (e.g., relative abundance for glycopeptide structures and absolute abundance for aglycosylated peptide structures) greater than a reference abundance as the treatment score. In one or more embodiments, the reference abundance for a given peptide structure may be, for example, a median abundance of a plurality of abundances for that peptide structure across a sample population (e.g., as identified during training). The relative abundance for a given peptide structure is the abundance of that peptide structure relative to the corresponding aglycosylated peptide structure (e.g., the peptide structure having the same peptide sequence but without a glycan structure being bound to the peptide sequence).

[0203] Step 506 includes generating a treatment output that indicates a predicted response to the treatment for the subject using the treatment score. The treatment output may be one example of an implementation for treatment output 334 in FIG. 3. In one or more embodiments, step 506 may be performed by generating the predicted response to the treatment based on whether the treatment score is above a selected threshold. The selected threshold may be, for example, 0.5. For example, step 506 may include identifying a first predicted response classification for the subject when the treatment score is above 0.5 or identifying a second predicted response classification for the subject when the treatment score is not above 0. The first predicted response classification may be “sustained control” and the second predicted response classification may be “early disruption.” Sustained control may indicate that an absence of disruption events is predicted during a sustained period of time (e.g., 6 months) after treatment administration. Early disruption may indicate that a presence of at least one disruption event is predicted during an initial period of time (e.g., 12 months) after treatment.

[0204] The treatment outcome may include, for example, a recommendation to modify a treatment plan for the subject. For example, in some cases, the treatment output may indicate that early disruption is predicted for the subject. Accordingly, it may be desirable to modify the treatment plan. For example, the recommendation for modifying the treatment plan may include at least one of selecting a different treatment for the subject, alter (e.g., increase/decrease) a dosage for the treatment, or combining the treatment with at least one other treatment.

[0205] In one or more embodiments, the treatment output includes at least one of a design for the treatment or a therapeutic dosage for the treatment. For example, in some cases when the treatment score indicates that the subject will respond well (e.g., sustained control) to the treatment, the treatment outcome may identify the therapeutic dosage for the treatment. In this manner, a medical professional that receives the treatment output at a remote system (e.g., phone, tablet, laptop, etc.) may be able to more quickly administer the treatment to the subject.

[0206] In one or more embodiments, process 500 may optionally include step 508. Step 508 may include administering a therapeutic dosage of the treatment based on the treatment output to the subject. For example, the treatment may be administered (e.g., via intravenous or oral administration) based on the predicted response being a predicted response classification that indicates the treatment will be successful. For example, a predicted response classification of “sustained control” may indicate that the subject is predicted to respond well to treatment.

TABLE 1
Peptide Structures associated with Melanoma Treatments

| | | | | Mono- | Linking | Linking | |
|---|---|---|---|---|---|---|---|
| | Peptide | (Protein) | (Peptide) | isotopic | Site Pos. | Site Pos. | Glycan |
| PS-ID | Structure (PS) | SEQ ID | SEQ ID | mass | in Protein | in Peptide | Structure |
| NO. | NAME | NO. | NO. | (Da) | Sequence | Sequence | GL NO. |
| PS-1 | IGG1_297_5400 | 1 | 45 | 2811.09 | 180 | 5 | 5400 |
| PS-2 | IGG2_297_5411 | 2 | 46 | 3216.25 | 176 | 5 | 5411 |
| PS-3 | IGG1_297_5510 | 1 | 45 | 3160.22 | 180 | 5 | 5510 |
| PS-4 | IGG2_297_5410 | 2 | 46 | 2925.15 | 176 | 5 | 5410 |
| PS-5 | IGG1_297_5410 | 1 | 45 | 2957.14 | 180 | 5 | 5410 |
| PS-6 | IGG2_297_4411 | 2 | 46 | 3054.20 | 176 | 5 | 4411 |
| PS-7 | THBG_36_5402 | 3 | 44 | 3880.57 | 36 | 10 | 5402 |
| PS-8 | IGG2_297_5510 | 2 | 46 | 3128.23 | 176 | 5 | 5510 |
| PS-9 | AGP1_33_6503 | 4 | 21 | 5436.40 | 33 | 15 | 6503 |
| PS-10 | CO8B_243_6610 | 5 | 22 | 4231.67 | 243 | 11 | 6610 |
| PS-11 | IGA12_144_5502 | 6, 20 | 23 | 5370.44 | 144 | 18 | 5502 |
| PS-12 | KLKB1_494_5410 | 7 | 24 | 4014.82 | 494 | 6 | 5410 |
| PS-13 | IGG1_297_4400 | 1 | 45 | 2649.03 | 180 | 5 | 4400 |
| PS-14 | AACT_271_7602 | 8 | 25 | 4686.91 | 271 | 4 | 7602 |
| PS-15 | CO8B_553_5410 | 5 | 26 | 3454.29 | 553 | 6 | 5410 |
| PS-16 | FETUA_156_5402.5421 | 9 | 27 | 3975.61 | 156 | 12 | 5402 |
| PS-17 | IGA12_144_5501 | 6, 20 | 23 | 5079.35 | 144 | 18 | 5501 |
| PS-18 | IGG2_297_4500 | 2 | 46 | 2820.12 | 176 | 5 | 4500 |
| PS-19 | AGP1_33_6502 | 4 | 21 | 5145.31 | 33 | 15 | 6502 |
| PS-20 | CLUS_374_6520.6501 | 10 | 28 | 3961.64 | 374 | 3 | 6501 |
| PS-21 | A2MG_869_5200 | 11 | 29 | 4629.04 | 869 | 6 | 5200 |
| PS-22 | CFAH_882_5420.5401 | 12 | 30 | 3933.66 | 882 | 15 | 5401 |
| PS-23 | CFAH_911_5420.5401 | 12 | 31 | 3474.32 | 911 | 5 | 5401 |
| PS-24 | HEMO_453_5420.5401 | 13 | 32 | 3648.55 | 453 | 7 | 5401 |
| PS-25 | IGG34_297_4410 | 14, 19 | 33 | 2779.10 | 227 | 5 | 4410 |
| | | | | | (IGG3)/177 | | |
| | | | | | (IGG4) | | |
| PS-26 | KLKB1_127_5410 | 7 | 34 | 4014.82 | 127 | 5 | 5410 |
| PS-27 | TRFE_432_5401 | 15 | 35 | 3389.42 | 432 | 12 | 5401 |
| PS-28 | QUANTPEP.IGG4_ | 19 | 36 | 1900.92 | N/A | N/A | N/A |
| | TTPPVLDSDGSFFLYSR | | | | | | |
| PS-29 | NEWQUANTPEP-IGG3_ | 14 | 37 | 2413.15 | N/A | N/A | N/A |
| | TPEVTCVVVDVSHEDPEVQFK | | | | | | |
| PS-30 | A2MG_869_6200 | 11 | 29 | 4791.10 | 869 | 6 | 6200 |
| PS-31 | HPT_184_5511 | 16 | 38 | 4941.20 | 184 | 6 | 5511 |
| PS-32 | VTNC_169_5401 | 17 | 39 | 2824.14 | 169 | 1 | 5401 |
| PS-33 | AACT_271_7603 | 8 | 25 | 4978.01 | 271 | 4 | 7603 |
| PS-34 | HPT_207_10803 | 16 | 40 | 5576.18 | 207 & 211 | 5 & 9 | 5401 & |
| | | | | | | | 5402 |
| PS-35 | HPT_241_5401.5420 | 16 | 41 | 3707.68 | 241 | 6 | 5401 |
| PS-36 | IGG34_297_4411 | 14, 19 | 33 | 3070.19 | 227 | 5 | 4411 |
| | | | | | (IGG3)/177 | | |
| | | | | | (IGG4) | | |
| PS-37 | ITIH4_517_5420.5401 | 18 | 42 | 4722.02 | 517 | 5 | 5401 |
| PS-38 | AACT_127_5401 | 8 | 43 | 4125.73 | 127 | 3 | 5401 |

TABLE 2
Peptide Structures associated with a First Treatment (e.g., Pembrolizumab Tx)

| | | | | Mono- | Linking | Linking | |
|---|---|---|---|---|---|---|---|
| | Peptide | (Protein) | (Peptide) | isotopic | Site Pos. | Site Pos. | Glycan |
| PS-ID | Structure (PS) | SEQ ID | SEQ ID | mass | in Protein | in Peptide | Structure |
| NO. | NAME | NO. | NO. | (Da) | Sequence | Sequence | GL NO. |
| PS-1 | IGG1_297_5400 | 1 | 45 | 2811.09 | 180 | 5 | 5400 |
| PS-2 | IGG2_297_5411 | 2 | 46 | 3216.25 | 176 | 5 | 5411 |
| PS-3 | IGG1_297_5510 | 1 | 45 | 3160.22 | 180 | 5 | 5510 |
| PS-4 | IGG2_297_5410 | 2 | 46 | 2925.15 | 176 | 5 | 5410 |
| PS-5 | IGG1_297_5410 | 1 | 45 | 2957.14 | 180 | 5 | 5410 |
| PS-6 | IGG2_297_4411 | 2 | 46 | 3054.20 | 176 | 5 | 4411 |
| PS-7 | THBG_36_5402 | 3 | 44 | 3880.57 | 36 | 10 | 5402 |
| PS-8 | IGG2_297_5510 | 2 | 46 | 3128.23 | 176 | 5 | 5510 |
| PS-9 | AGP1_33_6503 | 4 | 21 | 5436.40 | 33 | 15 | 6503 |
| PS-10 | CO8B_243_6610 | 5 | 22 | 4231.67 | 243 | 11 | 6610 |
| PS-11 | IGA12_144_5502 | 6, 20 | 23 | 5370.44 | 144 | 18 | 5502 |
| PS-12 | KLKB1_494_5410 | 7 | 24 | 4014.82 | 494 | 6 | 5410 |
| PS-13 | IGG1_297_4400 | 1 | 45 | 2649.03 | 180 | 5 | 4400 |
| PS-14 | AACT_271_7602 | 8 | 25 | 4686.91 | 271 | 4 | 7602 |
| PS-15 | CO8B_553_5410 | 5 | 26 | 3454.29 | 553 | 6 | 5410 |
| PS-16 | FETUA_156_ | 9 | 27 | 3975.61 | 156 | 12 | 5402 |
| | 5402.5421 | | | | | | |
| PS-17 | IGA12_144_5501 | 6, 20 | 23 | 5079.35 | 144 | 18 | 5501 |
| PS-18 | IGG2_297_4500 | 2 | 46 | 2820.12 | 176 | 5 | 4500 |
| PS-19 | AGP1_33_6502 | 4 | 21 | 5145.31 | 33 | 15 | 6502 |
| PS-20 | CLUS_374_ | 10 | 28 | 3961.64 | 374 | 3 | 6501 |
| | 6520.6501 | | | | | | |

TABLE 3
Peptide Structures associated with a Second treatment
(e.g., Ipilimumab/Nivolumab Tx)

| | | | | Mono- | Linking | Linking | |
|---|---|---|---|---|---|---|---|
| | Peptide | (Protein) | (Peptide) | isotopic | Site Pos. | Site Pos. | Glycan |
| PS-ID | Structure | SEQ ID | SEQ ID | mass | in Protein | in Peptide | Structure |
| NO. | (PS) NAME | NO. | NO. | (Da) | Sequence | Sequence | GL NO. |
| PS-21 | A2MG_869_5200 | 11 | 29 | 4629.04 | 869 | 6 | 5200 |
| PS-9 | AGP1_33_6503 | 4 | 21 | 5436.40 | 33 | 15 | 6503 |
| PS-22 | CFAH_882_5420.5401 | 12 | 30 | 3933.66 | 882 | 15 | 5401 |
| PS-23 | CFAH_911_5420.5401 | 12 | 31 | 3474.32 | 911 | 5 | 5401 |
| PS-24 | HEMO_453_5420.5401 | 13 | 32 | 3648.55 | 453 | 7 | 5401 |
| PS-25 | IGG34_297_4410 | 14, 19 | 33 | 2779.10 | 227 | 5 | 4410 |
| | | | | | (IGG3)/177 | | |
| | | | | | (IGG4) | | |
| PS-26 | KLKB1_127_5410 | 7 | 34 | 4014.82 | 127 | 5 | 5410 |
| PS-27 | TRFE_432_5401 | 15 | 35 | 3389.42 | 432 | 12 | 5401 |
| PS-28 | QUANTPEP.IGG4_ | 19 | 36 | 1900.92 | N/A | N/A | N/A |
| | TTPPVLDSDGSFF | | | | | | |
| | LYSR | | | | | | |
| PS-29 | NEWQUANTPEP- | 14 | 37 | 2413.15 | N/A | N/A | N/A |
| | IGG3_TPEVTCVV | | | | | | |
| | VDVSHEDPEVQFK | | | | | | |
| PS-30 | A2MG_869_6200 | 11 | 29 | 4791.10 | 869 | 6 | 6200 |
| PS-31 | HPT_184_5511 | 16 | 38 | 4941.20 | 184 | 6 | 5511 |
| PS-32 | VTNC_169_5401 | 17 | 39 | 2824.14 | 169 | 1 | 5401 |
| PS-33 | AACT_271_7603 | 8 | 25 | 4978.01 | 271 | 4 | 7603 |
| PS-34 | HPT_207_10803 | 16 | 40 | 5576.18 | 207 & 211 | 5 & 9 | 5401 & |
| | | | | | | | 5402 |
| PS-35 | HPT_241_5401.5420 | 16 | 41 | 3707.68 | 241 | 6 | 5401 |
| PS-36 | IGG34_297_4411 | 14, 19 | 33 | 3070.19 | 227 | 5 | 4411 |
| | | | | | (IGG3)/177 | | |
| | | | | | (IGG4) | | |
| PS-37 | ITIH4_517_5420.5401 | 18 | 42 | 4722.02 | 517 | 5 | 5401 |
| PS-12 | KLKB1_494_5410 | 7 | 24 | 4014.82 | 494 | 6 | 5410 |
| PS-38 | AACT_127_5401 | 8 | 43 | 4125.73 | 127 | 3 | 5401 |

[0207] II.B.2. Selecting Between Multiple Treatments

[0208] FIG. 6 is a flowchart of a process for treatment management of a subject diagnosed with a melanoma condition in accordance with various embodiments. Process 600 may be implemented using, for example, at least a portion of workflow 100 as described in FIGS. 1, 2A, and 2B and/or analysis system 300 as described in FIG. 3. In some embodiments, process 600 may be one example that includes and expands upon process 500 in FIG. 5.

[0209] Step 602 may include receiving peptide structure data corresponding to a set of peptide structures associated with a set of glycoproteins in a biological sample obtained from the subject. Step 602 may be performed in a manner similar to step 502 as described above with respect to FIG. 5.

[0210] Step 604 may include computing a plurality of treatment scores using quantification data identified from the peptide structure data for a plurality of subsets of the set of peptide structures, wherein each treatment score of the plurality of treatment scores corresponds to a different treatment of a plurality of treatments. Each subset of the plurality of subsets may include at least one peptide structure identified from a plurality of peptide structures listed in Table 1. Computing a treatment score of the plurality of treatment scores may be performed in a manner similar to step 504 as described above with respect to FIG. 5. Each treatment score may be computed using, for example, a proportion of a subset of the plurality of subsets of the set of peptide structures having a selected abundance (e.g., relative abundance for glycopeptide structures and absolute abundance for aglycosylated peptide structures) greater than a reference abundance for that peptide structure as a treatment score of the plurality of treatment scores.

[0211] In one or more embodiments, the plurality of subsets includes a first subset and a second subset. For example, step 604 may include computing a first treatment score for a first treatment of using a first portion of the quantification data identified from the peptide structure data for a first subset of the plurality of subsets of the set of peptide structures. Step 604 may further include computing a second treatment score for the second treatment using a second portion of the quantification data identified from the peptide structure data for a second subset of the plurality of subsets of the set of peptide structures. The first subset may include one or more peptide structures from those listed in Table 2. The second subset may include one or more peptide structures from those listed in Table 3.

[0212] In one or more embodiments, a subset of the plurality of subsets may have been previously identified using sample data for a sample population (e.g., subjects diagnosed with melanoma, in which at least a portion of the sample population has been treated with the plurality of treatments) and a statistical algorithm that identifies a relative significance for each peptide structure of a collection of peptide structures corresponding to the sample data with respect to a response to a selected treatment of the plurality of treatments. For example, identifying the subset may include performing a differential abundance analysis using the sample data to compare a first portion of the sample data corresponding to a first response classification (e.g., a positive response classification such as, for example, sustained control) for the selected treatment and a second portion of the sample data corresponding to a second response classification (e.g., a negative response classification such as, for example, early disruption) for the selected treatment to identify a selected N most differentiating peptide structures (e.g., the 20 most differentiating peptide structures) between the first response classification and the second response classification. The statistical algorithm may include, for example, a Wilcoxon rank-sum test.

[0213] Step 606 may include performing a comparison analysis of the plurality of treatment scores. Step 606 may be performed by, for example, determining which of the plurality of treatment scores is a highest-scoring treatment score. In some embodiments, step 606 may include determining that a treatment of the plurality of treatments has a treatment score below a selected threshold and excluding that treatment from the comparison analysis. The selected threshold may be, for example, 0.5.

[0214] Step 608 may include generating a treatment output based on the comparison analysis. The treatment output includes a recommended treatment plan for treating the subject. For example, step 608 may include identifying the treatment of the plurality of treatments having a highest treatment score as a recommended treatment for treating the subject.

[0215] In one or more embodiments, step 608 may include identifying a predicted response classification for the subject for each treatment of the plurality of treatments using a corresponding treatment score of the plurality of treatment scores. The predicted response classification may be, for example, a positive response classification, a negative response classification, or another type of response classification. In one or more embodiments, the predicted response classification for a particular treatment may be, for example, sustained control when the corresponding treatment score is above a selected threshold and may be, for example, early disruption when the corresponding treatment score is not above the selected threshold. The selected threshold may be, for example, 0.5.

[0216] In one or more embodiments, step 608 includes identifying a treatment of the plurality of treatments having a highest treatment score as a highest-scored treatment; determining that the highest treatment score is not above a selected threshold (e.g., 0.5); and generating the treatment output such that the recommended treatment plan includes a recommendation to modify an existing treatment plan for the subject. The recommendation for modifying the treatment plan may include at least one of selecting a different treatment for the subject, altering a dosage for a treatment that is part of the existing treatment plan, or combining the treatment with at least one other treatment.

[0217] In one or more embodiments, when the treatment output includes a recommended treatment, process 600 may optionally include step 610. Step 610 may include administering a therapeutic dosage of a treatment recommended by the treatment output to the subject.

[0218] FIG. 7 is a flowchart of a process for treatment management of a subject diagnosed with a melanoma condition in accordance with various embodiments. Process 700 may be implemented using, for example, at least a portion of workflow 100 as described in FIGS. 1, 2A, and 2B and/or analysis system 300 as described in FIG. 3. In some embodiments, process 700 may be one example that includes and expands upon process 500 in FIG. 5. Further, process 700 may be one example of an implementation of process 600 in FIG. 6.

[0219] Step 702 may include receiving peptide structure data corresponding to a set of peptide structures associated with a set of glycoproteins in a biological sample obtained from the subject. Step 702 may be performed in a manner similar to step 502 as described above with respect to FIG. 5.

[0220] Step 704 may include computing a first treatment score for a first treatment of pembrolizumab using first quantification data identified from the peptide structure data for a first subset of the set of peptide structures, wherein the first subset includes at least one peptide structure identified from a plurality of peptide structures listed in Table 2. The treatment score may be computed using, for example, a proportion of a subset of the plurality of subsets of the set of peptide structures having a selected abundance (e.g., relative abundance for glycopeptide structures and absolute abundance for aglycosylated peptide structures) greater than a reference abundance for that peptide structure as a treatment score of the plurality of treatment scores. In one or more embodiments, the first subset includes all of or a majority of (e.g., more than 15) the peptide structures listed in Table 2.

[0221] Step 706 may include computing a second treatment score for a second treatment comprised of nivolumab and ipilimumab using second quantification data identified from the peptide structure data for a second subset of the set of peptide structures, wherein the second subset includes at least one peptide structure identified from a plurality of peptide structures listed in Table 3. In one or more embodiments, the first subset includes all of or a majority of (e.g., more than 15) the peptide structures listed in Table 3.

[0222] Step 708 may include performing a comparison analysis of the first treatment score and the second treatment score. Step 708 may include, for example, determining which of the first treatment score and the second treatment score is a highest score.

[0223] Step 710 may include generating a treatment output based on the comparison analysis, wherein the treatment output identifies one of the first treatment and the second treatment as a recommended treatment for the subject. For example, step 710 may include identifying the highest-scoring treatment as a recommended treatment for treating the subject. The recommended treatment may then be administered to the subject to treat the subject's melanoma. For example, the treatment may be administered via at least one of intravenous or oral administration at a therapeutic dosage.

[0224] In one or more embodiments, process 700 may optionally include step 712. Step 712 may include administering a therapeutic dosage of the recommended treatment to the subject.

[0225] II.C. Exemplary Methodology for Identifying a Set of Peptide Structures Corresponding to a Treatment

[0226] FIG. 8 is a flowchart of a process for identifying a treatment for a subject diagnosed with a melanoma condition in accordance with one or more embodiments. Process 800 may be implemented using, for example, at least a portion of workflow 100 as described in FIGS. 1, 2A, and 2B and/or analysis system 300 as described in FIG. 3. In some embodiments, process 800 may be one example that includes and expands upon process 500 in FIG. 5.

[0227] Step 802 includes receiving sample data for a sample population in which the sample data characterizes responses of a plurality of sample subjects diagnosed with the melanoma condition to the treatment and includes sample peptide structure data for a collection of peptide structures for each subject of the plurality of sample subjects.

[0228] Step 804 includes grouping the sample data based on the responses of the plurality of sample subjects into a first group corresponding to a first response classification and a second group corresponding to a second response classification.

[0229] Step 806 includes performing a differential abundance analysis using the sample data to compare the first group of the sample data corresponding to the first response classification and the second group of the sample data corresponding to the second response classification to identify a set of peptide structures from the collection of peptide structures. The set of peptide structures may be identified as a selected N most differentiating peptide structures (e.g., the 20 most significant peptide structures for differentiation) between the first response classification and the second response classification. The first response classification may be, for example, sustained control, which indicates an absence of disruption events during a sustained period of time (e.g., 12 months) after treatment administration. The second response classification may be, for example, early disruption, which indicates a presence of at least one disruption event during an initial period of time (e.g., 6 months) after treatment.

[0230] This set of peptide structure that is identified in step 806 may then be used in future analysis (e.g., in process 500 in FIG. 5, in process 600 in FIG. 6, in process 700 in FIG. 7) to compute a treatment score for a subject using the subject's peptide structure profile that indicates the likelihood of a successful response (e.g., sustained control) of the subject to the treatment.

[0231] Step 806 may be performed using, for example, a Wilcoxon rank-sum test in one or more embodiments. Exemplary results of the differential abundance analysis performed using the Wilcoxon rank-sum test are presented below in Tables 5 and 6.

TABLE 4
Wilcoxon Analysis of Peptide Structures associated with Pembrolizumab Tx

| PS-ID | Median | Median | Differential | Wilcoxon | |
|---|---|---|---|---|---|
| NO. | SC | EF | (SC-EF) | p-value | FDR |
| PS-1 | 0.5016406 | −0.3477531 | 0.8493937 | 0.0017802 | 0.3761093 |
| PS-2 | 0.5490382 | −0.6903325 | 1.2393706 | 0.0022447 | 0.3761093 |
| PS-3 | 0.6102916 | −0.4022977 | 1.0125893 | 0.0028112 | 0.3761093 |
| PS-4 | 0.4726799 | −0.8630625 | 1.3357424 | 0.0034924 | 0.3761093 |
| PS-5 | 0.9085908 | −0.820044 | 1.7286347 | 0.0043126 | 0.3761093 |
| PS-6 | −0.0540671 | −0.3156836 | 0.2616165 | 0.0052867 | 0.3761093 |
| PS-7 | 0.2843746 | −0.31304 | 0.5974146 | 0.0052867 | 0.3761093 |
| PS-8 | 0.3041313 | −0.568187 | 0.8723183 | 0.0064434 | 0.4011026 |
| PS-9 | 0.3805894 | −0.3185274 | 0.6991168 | 0.0078028 | 0.4317552 |
| PS-10 | 0.6412248 | −0.2431649 | 0.8843898 | 0.0093974 | 0.4679899 |
| PS-11 | −0.0136785 | −0.6949529 | 0.6812744 | 0.0112501 | 0.5093223 |
| PS-12 | 0.2518882 | −0.4929206 | 0.7448088 | 0.0134001 | 0.5561048 |
| PS-13 | 0.6384324 | −0.1801925 | 0.8186249 | 0.0158719 | 0.582317 |
| PS-14 | 0.3603753 | −0.1926793 | 0.5530546 | 0.018709 | 0.582317 |
| PS-15 | 0.5414354 | −0.2145807 | 0.7560161 | 0.018709 | 0.582317 |
| PS-16 | −0.0702782 | −0.4763048 | 0.4060266 | 0.018709 | 0.582317 |
| PS-17 | 0.4330799 | −0.4610782 | 0.8941581 | 0.0219396 | 0.6069946 |
| PS-18 | 0.2377877 | −0.5018914 | 0.7396791 | 0.0219396 | 0.6069946 |
| PS-19 | 0.4095444 | −0.313772 | 0.7233164 | 0.029749 | 0.6590555 |
| PS-20 | 0.1573811 | −0.2217593 | 0.3791404 | 0.029749 | 0.6590555 |

TABLE 5
Wilcoxon Analysis of Peptide Structures associated with Ipilimumab/NivolumabTx

| PS-ID | Median | Median | Differential | Wilcoxon | |
|---|---|---|---|---|---|
| NO. | SC | EF | (SC-EF) | p-value | FDR |
| PS-21 | 0.3328389 | −0.6312886 | 0.9641274 | 0.0021645 | 0.3761093 |
| PS-9 | 0.5024846 | 0.0758823 | 0.4266023 | 0.0021645 | 0.3761093 |
| PS-22 | 1.0534081 | −0.6860991 | 1.7395073 | 0.0021645 | 0.3761093 |
| PS-23 | 0.7030683 | −0.5793093 | 1.2823776 | 0.0021645 | 0.3761093 |
| PS-24 | 0.5131039 | −0.792533 | 1.3056369 | 0.0021645 | 0.3761093 |
| PS-25 | 0.4540561 | −0.9637756 | 1.4178318 | 0.0021645 | 0.3761093 |
| PS-26 | 0.6041198 | −0.8676916 | 1.4718114 | 0.0021645 | 0.3761093 |
| PS-27 | 0.3696252 | −0.8139757 | 1.1836009 | 0.0021645 | 0.4011026 |
| PS-28 | 1.0638627 | −1.0730903 | 2.1369529 | 0.0021645 | 0.4317552 |
| PS-29 | 0.938314 | −1.056397 | 1.994711 | 0.0021645 | 0.4679899 |
| PS-30 | 0.1958926 | −0.7169942 | 0.9128868 | 0.004329 | 0.5093223 |
| PS-31 | 0.3090463 | −1.5388815 | 1.8479278 | 0.004329 | 0.5561048 |
| PS-32 | 0.9161205 | −0.7184875 | 1.634608 | 0.004329 | 0.582317 |
| PS-33 | 0.1694553 | −1.6309309 | 1.8003861 | 0.008658 | 0.582317 |
| PS-34 | 0.3946123 | −0.5476397 | 0.942252 | 0.0151515 | 0.582317 |
| PS-35 | 0.320616 | −0.4720598 | 0.7926757 | 0.0151515 | 0.582317 |
| PS-36 | 0.4591413 | −0.6433692 | 1.1025105 | 0.0151515 | 0.6069946 |
| PS-37 | 0.0750044 | −1.5985227 | 1.6735272 | 0.0151515 | 0.6069946 |
| PS-12 | 0.3832391 | −0.6207699 | 1.0040091 | 0.0151515 | 0.6590555 |
| PS-38 | 0.6264716 | 0.1222803 | 0.5041913 | 0.025974 | 0.6590555 |

### III. Peptide Structure and Product Ion Compositions, Kits and Reagents

[0232] Aspects of the disclosure include compositions comprising one or more of the peptide structures listed in Table 1. In some embodiments, a composition comprises a plurality of the peptide structures listed in Table 1. In some embodiments, a composition comprises 1, 2, 3, 4, 5, 6, 7, 8, 9, 10, 11, 12, 13, 14, 15, 16, 17, 18, 19, 20, 21, 22, 23, 24, 25, 26, 27, 28, 29, 30, 31, 32, 33, 34, 35, 36, 37, or 38 of the peptide structures listed in Table 1. In some embodiments, a composition comprises a peptide structure having an amino acid sequence with at least 80% sequence identity, such as, for example, at least 81%, 82%, 83%, 84%, 85%, 86%, 87%, 88%, 89%, 90%, 91%, 92%, 93%, 94%, 95%, 96%, 97%, 98%, 99%, or 100% sequence identity to any one of SEQ ID NOs: 21-46, listed in Table 1 and defined in Table 7 below.

[0233] Aspects of the disclosure include compositions comprising one or more precursor ions having a defined charge and/or defined mass-to-charge (m/z) ratio, as listed in Table 6. Aspects of the disclosure include compositions comprising one or more product ions having a defined mass-to-charge (m/z) ratio, which product ions are produced by converting a peptide structure described herein (e.g., a peptide structure listed in Table 1) into a gas phase ion in a mass spectrometry system. Conversion of the peptide structure into a gas phase ion can take place using any of a variety of techniques, including, but not limited to, matrix assisted laser desorption ionization (MALDI); electron ionization (EI); electrospray ionization (ESI); atmospheric pressure chemical ionization (APCI); and/or atmospheric pressure photo ionization (APPI).

[0234] Aspects of the disclosure include compositions comprising one or more product ions produced from one or more of the peptide structures described herein (e.g., a peptide structure listed in Table 1). In some embodiments, a composition comprises a set of the product ions listed in Table 1, having an m/z ratio selected from the list provided for each peptide structure in Table 1.

[0235] In some embodiments, a composition comprises at least one of peptide structures PS-1 to PS-38 identified in Table 1.

[0236] In some embodiments, a composition comprises a peptide structure or a product ion. The peptide structure or product ion comprises an amino acid sequence having at least 90% sequence identity to any one of SEQ NOs: 21-46, as identified in Table 7, corresponding to peptide structures PS-1 to PS-38 in Table 1.

[0237] In some embodiments, a composition comprises a peptide structure having a monoisotopic mass identified in Table 1 as corresponding to the peptide structure.

[0238] In some embodiments, the product ion is selected as one from a group consisting of product ions identified in Table 6, including product ions falling within an identified m/z range of the m/z ratio identified in Table 6 and characterized as having a precursor ion having an m/z ratio within an identified m/z range of the m/z ratio identified in Table 6. A first range for the product ion m/z ratio may be ±0.5. A second range for the product ion m/z ratio may be ±0.8. A third range for the product ion m/z ratio may be ±1.0. A first range for the precursor ion m/z ratio may be ±0.5; a second range for the precursor ion m/z ratio may be ±1.0; a third range for the precursor ion m/z ratio may be ±1.5. Thus, a composition may include a product ion having an m/z ratio that falls within at least one of the first range (±0.5), the second range (±0.8), or the third range (±1.0) of the product ion m/z ratio identified in Table 6, and characterized as having a precursor ion having an m/z ratio that falls within at least one of a first range (±0.5), a second range (±1.0), or a third range (±1.5) of the precursor ion m/z ratio identified in Table 6.

TABLE 6
Mass Spectrometry-Related Characteristics for the Peptide Structures associated
with Melanoma Treatments

| | | | | | 1st | 1st | 2nd | 2nd |
|---|---|---|---|---|---|---|---|---|
| PS-ID | RT | Collision | Precursor | Precursor | Product | Product | Product | Product |
| NO. | (min) | Energy | m/z | Charge | m/z | Charge | m/z | Charge |
| PS-1 | 7.8 | 22 | 938.4 | 3 | 366.1 | 1 | 1392.6 | 1 |
| PS-2 | 13.6 | 26 | 1073.1 | 3 | 366.1 | 1 | 1360.6 | 1 |
| PS-3 | 8 | 20 | 1054.7 | 3 | 366.1 | 1 | 1392.6 | 1 |
| PS-4 | 12.7 | 20 | 976.1 | 3 | 366.1 | 1 | 1360.6 | 1 |
| PS-5 | 7.8 | 24 | 987.1 | 3 | 366.1 | 1 | 1392.6 | 1 |
| PS-6 | 13.9 | 30 | 1019.4 | 3 | 204.1 | 1 | 1360.6 | 1 |
| PS-7 | 11.1 | 38 | 1295.2 | 3 | 366.1 | 1 | N/A | N/A |
| PS-8 | 12.8 | 25 | 1043.8 | 3 | 366.1 | 1 | 1360.6 | 1 |
| PS-9 | 39 | 27 | 1088.6 | 5 | 366.1 | 1 | N/A | N/A |
| PS-10 | 13.5 | 33 | 1073.4 | 4 | 366.1 | 1 | N/A | N/A |
| PS-11 | 41.5 | 26 | 1075.1 | 5 | 366.1 | 1 | 1056.2 | 3 |
| PS-12 | 30.4 | 20 | 1004.7 | 4 | 366.1 | 1 | N/A | N/A |
| PS-13 | 7.9 | 21 | 884.4 | 3 | 204.1 | 1 | 1392.6 | 1 |
| PS-14 | 30.2 | 28 | 1173.2 | 4 | 366.1 | 1 | 978.5 | 2 |
| PS-15 | 25 | 35 | 1152.4 | 3 | 366.1 | 1 | N/A | N/A |
| PS-16 | 27.3 | 24 | 995.4 | 4 | 366.1 | 1 | N/A | N/A |
| PS-17 | 40.8 | 20 | 1017.3 | 5 | 366.1 | 1 | 1584.4 | 2 |
| PS-18 | 13 | 23 | 941.1 | 3 | 204.1 | 1 | 1360.6 | 1 |
| PS-19 | 38 | 32 | 1287.7 | 4 | 366.1 | 1 | N/A | N/A |
| PS-20 | 23.3 | 33 | 991.4 | 4 | 366.1 | 1 | N/A | N/A |
| PS-21 | 34.4 | 23 | 1158.8 | 4 | 1206.9 | 3 | 366.1 | 1 |
| PS-22 | 14.8 | 25 | 984.7 | 4 | 366.1 | 1 | N/A | N/A |
| PS-23 | 12.1 | 35 | 1159.4 | 3 | 366.1 | 1 | N/A | N/A |
| PS-24 | 29.7 | 15 | 913.4 | 4 | 366.1 | 1 | 1234 | 2 |
| PS-25 | 9.9 | 15 | 927.4 | 3 | 204.1 | 1 | 1376.6 | 1 |
| PS-26 | 30.9 | 31 | 1004.7 | 4 | 366.1 | 1 | N/A | N/A |
| PS-27 | 26.2 | 28 | 1131.1 | 3 | 366.1 | 1 | 840.4 | 2 |
| PS-28 | 36.5 | 45 | 951.5 | 2 | 1178.5 | 1 | 1293.6 | 1 |
| PS-29 | 31.9 | 25 | 805.4 | 3 | 994.5 | 2 | 1044 | 2 |
| PS-30 | 34.4 | 30 | 1199.3 | 4 | 1206.9 | 3 | 366.1 | 1 |
| PS-31 | 34 | 30 | 1236.1 | 4 | 366.1 | 1 | N/A | N/A |
| PS-32 | 23.8 | 23 | 942.4 | 3 | 366.1 | 1 | 1114.6 | 1 |
| PS-33 | 31.1 | 28 | 1246 | 4 | 366.1 | 1 | 978.5 | 2 |
| PS-34 | 13 | 27 | 1116.4 | 5 | 366.1 | 1 | N/A | N/A |
| PS-35 | 29.1 | 31 | 1237.3 | 3 | 366.1 | 1 | 999.5 | 2 |
| PS-36 | 10.5 | 25 | 1024.5 | 3 | 204.1 | 1 | 1376.6 | 1 |
| PS-37 | 32.7 | 30 | 1182 | 4 | 366.1 | 1 | N/A | N/A |
| PS-38 | 33 | 20 | 1032.9 | 4 | 366.1 | 1 | 1208.6 | 2 |

[0239] Table 7 defines the peptide sequences for SEQ ID NOS: 21-46 from Table 1. Table 7 further identifies a corresponding protein SEQ ID NO for each peptide sequence. Each peptide sequence in Table 7 is defined as an amino acid sequence.

TABLE 7
Peptide SEQ ID NOS

| SEQ | | Corresponding |
|---|---|---|
| ID | | Protein |
| NO: | Peptide Sequence | SEQ ID NO: |
| 21 | QIPLCANLVPVPITNATLDQITGK | 4 |
| 22 | EYESYSDFERNVTEK | 5 |
| 23 | LSLHRPALEDLLLGSEANLTCTLTGLR | 6,45 |
| 24 | LQAPLNYTEFQKPICLPSK | 7 |
| 25 | YTGNASALFILPDQDK | 8 |
| 26 | WNCWSNWSSCSGR | 5 |
| 27 | VCQDCPLLAPLNDTR | 9 |
| 28 | LANLTQGEDQYYLR | 10 |
| 29 | SLGNVNFTVSAEALESQELCGTEVPSVPEHGR | 11 |
| 30 | IPCSQPPQIEHGTINSSR | 12 |
| 31 | ISEENETTCYMGK | 12 |
| 32 | ALPQPQNVTSLLGCTH | 13 |
| 33 | EEQYNSTFR | 14,44 |
| 34 | GVNFNVSK | 7 |
| 35 | CGLVPVLAENYNK | 15 |
| 36 | TTPPVLDSDGSFFLYSR | 44 |
| 37 | TPEVTCVVVDVSHEDPEVQFK | 14 |
| 38 | MVSHHNLTTGATLINEQWLLTTAK | 16 |
| 39 | NGSLFAFR | 17 |
| 40 | NLFLNHSENATAK | 16 |
| 41 | VVLHPNYSQVDIGLIK | 16 |
| 42 | LPTQNITFQTESSVAEQEAEFQSPK | 18 |
| 43 | TLNQSSDELQLSMGNAMFVK | 8 |
| 44 | VTACHSSQPNATLYK | 3 |
| 45 | EEQYNSTYR | 1 |
| 46 | EEQFNSTFR | 2 |

[0240] Table 8 identifies the proteins of SEQ ID NOS: 1-20 from Table 1. Table 8 identifies a corresponding protein abbreviation and protein name for each of protein SEQ ID NOS: 1-20. Further, Table 8 identifies a corresponding Uniprot ID for each of protein SEQ ID NOS: 1-20.

TABLE 8
Protein SEQ ID NOS

| SEQ | Protein | | |
|---|---|---|---|
| ID | Abbre- | | Uniprot |
| NO. | viation | Protein Name | ID |
| 1 | IGG1 | Immunoglobulin heavy constant gamma 1 | P01857 |
| 2 | IGG2 | Immunoglobulin heavy constant gamma 2 | P01859 |
| 3 | THBG | Thyroxine-binding globulin | P05543 |
| 4 | AGP1 | Alpha-1-acid glycoprotein 1 | P02763 |
| 5 | CO8B | Complement component C8 beta chain | P07358 |
| 6 | IGAI | Immunoglobulin heavy constant alpha l | P01876 |
| 7 | KLKB1 | Plasma kallikrein | P03952 |
| 8 | AACT | Alpha-1-antichymotrypsin | P01011 |
| 9 | FETUA | Alpha-2-HS-glycoprotein | P02765 |
| 10 | CLUS | Clusterin | P10909 |
| 11 | A2MG | Alpha-2-macroglobulin | P01023 |
| 12 | CFAH | Complement factor H | P08603 |
| 13 | HEMO | Hemopexin | P02790 |
| 14 | IGG3 | Immunoglobulin heavy constant gamma 3 | P01860 |
| 15 | TREE | Serotransferrin | P02787 |
| 16 | HPT | Haptoglobin | P00738 |
| 17 | VTNC | Vitronectin | P04004 |
| 18 | ITIH4 | Inter-alpha-trypsin inhibitor heavy chain H4 | Q14624 |
| 19 | IGG4 | Immunoglobulin heavy constant gamma 4 | P01861 |
| 20 | IGA2 | Immunoglobulin heavy constant alpha 2 | P01877 |

[0241] Table 9 identifies and defines the glycan structures from Table 1. Table 9 identifies a graphical representation of the structure and a coded representation of the composition for each glycan structure included in Table 1. As used herein, the 4-digit GL NO. is a designation that represents the number of hexoses, the number of HexNAcs, the number of Fucoses, and the number of Neuraminic Acids.

[0242] Aspects of the disclosure include kits comprising one or more compositions, each comprising one or more peptide structures of the disclosure that can be used as assay standards, and instructions for use. Kits in accordance with one or more embodiments described herein may include a label indicating the intended use of the contents of the kit. The term “label” as used herein with respect to a kit includes any writing, or recorded material supplied on or with a kit, or that otherwise accompanies a kit.

[0243] The peptide structures and the transitions produced therefrom, as described herein, may be useful for treatment management of melanoma. A transition includes a precursor ion and at least one product ion grouping. As reviewed herein, the peptide structures in Table 1, as well as their corresponding precursor ion and product ion groupings (these ions having defined m/z ratios or m/z ratios that fall within the m/z ranges identified herein), can be used in mass spectrometry-based analyses to predict treatment response, select a treatment for administration, determine whether to alter a treatment plan or dosage, or a combination thereof.

[0244] Aspects of the disclosure include methods for analyzing one or more peptide structures, as described herein. In some embodiments, the methods involve processing a sample from a patient to generate a prepared sample that can be inputted into a mass spectrometry system (e.g., a reaction monitoring mass spectrometry system). In certain embodiments, processing the sample can comprise performing one or more of: a denaturation procedure, a reduction procedure, an alkylation procedure, and a digestion procedure. The denaturation and reduction procedures may be implemented in a manner similar to, for example, denaturation and reduction 202 in FIG. 2A. The alkylation procedure may be implemented in a manner similar to, for example, alkylation procedure 204 in FIG. 2A. The digestion procedure may be implemented in a manner similar to, for example, digestion procedure 206 in FIG. 2A.

[0245] In some embodiments, the methods for analyzing one or more peptide structures involve detecting a set of product ions generated by a reaction monitoring mass spectrometry system in which one or more product ions may correspond to each of the one or more peptide structures that have been inputted into the mass spectrometry system. As described herein, each peptide structure can be converted into a set of product ions having a defined m/z ratio, as provided in Table 6 or an m/z ratio within an identified m/z ratio as provided in Table 6. In some embodiments, the methods involve generating quantification (e.g., abundance) data for the one or more product ions detected using the reaction monitoring mass spectrometry system.

[0246] In some embodiments, the methods further comprise generating a diagnosis output using the quantification data and a model that has been trained using supervised or unsupervised machine-learning. In certain embodiments, the reaction monitoring mass spectrometry system may include multiple/selected reaction monitoring mass spectrometry (MRM/SRM-MS) to detect the one or more product ions and generate the quantification data.

### IV. Representative Experimental Results

### Samples:

[0247] Sample data via glycoproteomic analysis of pretreatment blood samples was compiled for a sample population comprising advanced malignant melanoma patients treated with pembrolizumab (Pembro; n=24) or nivolumab-ipilimumab (ipi/nivo; n=11). Samples were analyzed using an advanced glycoproteomics platform that combines ultra-high-performance liquid chromatography coupled to triple quadrupole mass spectrometry and a neural-network-based data processing engine. Individual glycopeptide signatures derived from 67 abundant serum proteins were analyzed and correlated with treatment, progression-free survival (PFS, and other clinical outcome metrics).

### Analysis:

[0248] Two response groups were defined based on PFS: early disruption (e.g., early failure) (EF; PFS event within 6 months) and sustained control (SC; no events for ≥12 months). Differential relative/absolute abundances for 498 serum glycopeptides and aglycosylated peptides were calculated between SC and EF patients for each treatment group to determine a set of peptide structures more abundant in each SC versus EF by treatment group. A score was developed for each treatment group based on the 20 markers within each treatment group identified as the most statistically significant ones based on one-sided Wilcoxon test comparing EF and SC. For a given patient, the score was computed as the proportion of glycopeptides/aglycosylated peptides with relative/absolute abundance exceeding their median abundance. A low score was associated with high risk for early failure.

[0249] Table 10 and Table 11 below show the median abundances identified for the set of peptide structures. These median abundances are examples of what may be used as reference abundances for these peptide structures.

TABLE 10
Median Abundances for Peptide Structures associated with Pembro

| PS-ID | | |
|---|---|---|
| NO. | Peptide Structure (PS) NAME | Median Abundance |
| PS-1 | IGG1_297_5400 | 0.1044605 |
| PS-2 | IGG2_297_5411 | 0.1214551 |
| PS-3 | IGG1_297_5510 | 0.1032259 |
| PS-4 | IGG2_297_5410 | 0.0993292 |
| PS-5 | IGG1_297_5410 | 0.0525704 |
| PS-6 | IGG2_297_4411 | −0.0737209 |
| PS-7 | THBG_36_5402 | 0.1421563 |
| PS-8 | IGG2_297_5510 | 0.1248705 |
| PS-9 | AGP1_33_6503 | 0.3600423 |
| PS-10 | CO8B_243_6610 | 0.1909322 |
| PS-11 | IGA12_144_5502 | −0.1191828 |
| PS-12 | KLKB1_494_5410 | 0.0492207 |
| PS-13 | IGG1_297_4400 | 0.1883168 |
| PS-14 | AACT_271_7602 | 0.0923715 |
| PS-15 | CO8B_553_5410 | −0.014819 |
| PS-16 | FETUA_156_5402.5421 | −0.2216863 |
| PS-17 | IGA12_144_5501 | 0.0029389 |
| PS-18 | IGG2_297_4500 | 0.0712961 |
| PS-19 | AGP1_33_6502 | 0.0921509 |
| PS-20 | CLUS_374_6520.6501 | 0.0556276 |

TABLE 11
Median Abundances for Peptide Structures
associated with Ipi/Nivo

| | | Glycan |
|---|---|---|
| PS-ID | | Structure |
| NO. | Peptide Structure (PS) NAME | GL NO. |
| PS-21 | A2MG_869_5200 | 0.0754619 |
| PS-9 | AGP1_33_6503 | 0.3600423 |
| PS-22 | CFAH_882_5420.5401 | 0.1460826 |
| PS-23 | CFAH_911_5420.5401 | 0.1281516 |
| PS-24 | HEMO_453_5420.5401 | 0.2013525 |
| PS-25 | IGG34_297_4410 | 0.2134462 |
| PS-26 | KLKB1_127_5410 | -0.0022041 |
| PS-27 | TRFE_432_5401 | -0.0482695 |
| PS-28 | QUANTPEP.IGG4_TTPPVLDSDGSFFLYSR | 0.0439244 |
| PS-29 | NEWQUANTPEP- | -0.0280153 |
| | IGG3_TPEVTCVVVDVSHEDPEVQFK | |
| PS-30 | A2MG_869_6200 | -0.0430135 |
| PS-31 | HPT_184_5511 | -0.2843536 |
| PS-32 | VTNC_169_5401 | -0.0248306 |
| PS-33 | AACT_271_7603 | 0.1237403 |
| PS-34 | HPT_207_10803 | 0.0825476 |
| PS-35 | HPT_241_5401.5420 | -0.0008547 |
| PS-36 | IGG34_297_4411 | 0.2102183 |
| PS-37 | ITIH4_517_5420.5401 | 0.0750044 |
| PS-12 | KLKB1_494_5410 | 0.0492207 |
| PS-38 | AACT_127_5401 | 0.0715 |

### Results:

[0250] When examined in all patients in the cohort (regardless of treatment), both treatment scores isolated EF from SC. Algorithmic assignment was performed by choosing the treatment with the highest treatment-specific score (e.g., if ipi/nivo score>pembro score, then assign to ipi/nivo). PFS was superior for cases where the assigned treatment matched the treatment received. Log-rank p-values comparing PFS by assigned treatment within pembro- and ipi/nivo-treated cases were 0.009 and 0.0004, respectively. Our results show that serum glycoproteomic analysis allows targeted treatment assignment not only to immune checkpoint inhibitor treatment in general, but specifically to the most likely successful agent among different drugs for melanoma. This may fundamentally improve the clinical use of immuno-therapy in subjects with melanoma.

[0251] FIG. 9 is a plot showing the distribution of the treatment scores generated for those patients who were treated with pembro in accordance with one or more embodiments.

[0252] FIG. 10 is a plot showing the distribution of the treatment scores generated for those patients who were treated with ipi/nivo in accordance with one or more embodiments.

[0253] FIG. 11 is a scatterplot showing the treatment scores by treatment type in accordance with one or more embodiments.

[0254] FIG. 12 is a plot showing disruption event times for patients treated with pembro by their predicted response.

[0255] FIG. 13 is a plot showing disruption event times for patients treated with ipi/nivo by their predicted response.

### 2. Biomarkers for Determining Immuno-Oncology Response

[0256] Provided herein are methods, devices, glycopeptides, and kits for identifying glycoproteomic biomarkers and signatures for risk of having a disease or a condition, progression of the disease or condition, and response of the disease or condition to a treatment, such as treatment with immune checkpoint blockade for cancer. In some cases, the disease or condition may be cancer. In some cases, the progression of the disease or condition includes but is not limited to stage of cancer or size of tumor or a surrogate endpoint. Such information may be used to provide actionable recommendations for treatment to a healthcare provider, including but not limited to initiation of a new treatment, continuation of ongoing treatment, adding a new therapy, or changing the dosage and/or frequency of ongoing treatment.

[0257] Protein glycosylation is one of the abundant and most complex form of post-translational protein modification. Glycosylation profoundly can affect structure, conformation, and function of a polypeptide. The elucidation of the potential role of differential polypeptide glycosylation as biomarkers has so far been limited by the technical complexity of generating and interpreting this information. A novel, powerful platform has been established that combines ultra-high-performance liquid chromatography (LC) coupled to triple quadrupole mass spectrometry (MS) with a machine-learning and neural-network-based data processing engine that allows for high-throughput, highly scalable interrogation of the glycoproteome. The glycoproteomic biomarkers and signatures may be used to predict which cancer patients may respond to immune checkpoint blockade treatment, such as PD1/PDL1 checkpoint inhibitors.

[0258] Changes in glycosylation have been described in relationship to disease states such as cancer. See, e.g., Dube, D. H.; Bertozzi, C. R. Glycans in Cancer and Inflammation—Potential for Therapeutics and Diagnostics. Nature Rev. Drug Disc. 2005, 4, 477-88, the entire contents of which are herein incorporated by reference in its entirety for all purposes. However, clinically relevant, non-invasive assays for diagnosing cancer in a patient based on glycosylation changes in a sample from that patient are still needed.

[0259] Mass spectroscopy (MS) offers sensitive and precise measurement of cancer-specific biomarkers including glycopeptides. See, for example, Ruhaak, L. R., et al., Protein-Specific Differential Glycosylation of Immunoglobulins in Serum of Ovarian Cancer Patients DOI: 10.1021/acs.jproteome.5b01071; J. Proteome Res., 2016, 15, 1002-1010 (2016); also Miyamoto, S., et al., Multiple Reaction Monitoring for the Quantitation of Serum Protein Glycosylation Profiles: Application to Ovarian Cancer, DOI: 10.1021/acs.jproteome.7b00541, J. Proteome Res. 2018, 17, 222-233 (2017), the entire contents of which are herein incorporated by reference in its entirety for all purposes. However, using MS to diagnose cancer has not been demonstrated to date in a clinically relevant manner. What is needed are new biomarkers and new methods of using MS to assess a diagnosis for a disease or a condition, a risk of having a disease or a condition, progression of the disease or condition, and response of the disease or condition to a treatment.

[0260] I. Overview

[0261] Provided herein are methods for identifying one or more glycopeptide biomarkers predictive of a disease or a condition in a subject, the method comprising: (a) obtaining from a subject a first sample at a first timepoint and a second sample at a second timepoint, wherein the first sample and the second sample comprise a glycoprotein; (b) fragmenting the glycoprotein in the first sample or the second sample into one or more glycopeptides, wherein the one or more glycopeptides comprise one or more amino acid sequences selected from a group consisting of SEQ ID NO: 101-131, 159-207, and 21-46, and combinations thereof; (c) determining an amount of the one or more glycopeptides using multiple reaction monitoring mass spectrometry (MRM-MS); (d) associating the amount of the one or more glycopeptides with the first timepoint or the second timepoint, wherein the subject has a change in a disease or a condition from the first timepoint to the second timepoint; and (e) identifying as glycopeptide biomarkers the glycopeptide where the amount of the one or more glycopeptides changed from the first timepoint to the second timepoint.

[0262] Described herein are methods for identifying one or more glycopeptide biomarkers predictive of a disease or a condition in a subject, the method comprising: (a) obtaining, by a computer, data of an amount of one or more glycopeptides for a set (n) of subjects, wherein the one or more glycopeptides are generated by fragmenting a glycoprotein in a sample from a subject, the amount of one or more glycopeptides are determined using multiple reaction monitoring mass spectrometry (MRM-MS), and the data for each subject comprises data from samples taken at a plurality of timepoints; (b) selecting, by the computer, a subset of the one or more glycopeptides to include in a predictive model; (c) assessing, by the computer, the predictive model using a cross-validation with n−1 subjects to generate an outcome score for a holdout subject; (d) iterating, by the computer, step (c) for each of n subjects as the holdout subject to generate an outcome score for each subject; (e) dichotomizing, by the computer, the outcome scores for each subject at a cutoff outcome score as below or above the cutoff outcome score; (f) analyzing, by the computer, the amount of one or more glycopeptides for subjects having outcome scores above the cutoff outcome score to the amount of one or more glycopeptides for subjects having outcome scores below the cutoff outcome score for each glycopeptide in the subset of the one or more glycopeptides to determine a hazard ratio and an interaction p-value for each glycopeptide; (g) identifying, by the computer, the glycopeptide having the interaction p-value ≤0.05 as a glycopeptide biomarker for predicting the disease or the condition. In some embodiments, the cross-validation is leave-one-out cross-validation (LOOCV). In some embodiments, the cutoff outcome score was determined to optimize Harrell's C-index. In some embodiments, the interaction p-value is less than or equal to 0.01, 0.005, or 0.001 in step (g).

[0263] Provided herein are method for identifying one or more glycopeptide biomarkers predictive of a disease or a condition in a subject, the method comprising: (a) obtaining, by a computer, data of an amount of one or more glycopeptides for a set (n) of subjects, wherein the one or more glycopeptides are generated by fragmenting a glycoprotein in a sample from a subject, the amount of one or more glycopeptides are determined using multiple reaction monitoring mass spectrometry (MRM-MS), and the data for each subject comprises data from samples taken at a plurality of timepoints; (b) selecting, by the computer, a subset of the one or more glycopeptides to include in a predictive model; (c) assessing, by the computer, the predictive model using a cross-validation with n−1 subjects to generate an outcome score for a holdout subject; (d) iterating, by the computer, step (c) for each of n subjects as the holdout subject to generate an outcome score for each subject; (e) dichotomizing, by the computer, the outcome scores for each subject at a cutoff outcome score as below or above the cutoff outcome score; (f) analyzing, by the computer, the amount of one or more glycopeptides for subjects having outcome scores above the cutoff outcome score to the amount of one or more glycopeptides for subjects having outcome scores below the cutoff outcome score for each glycopeptide in the subset of the one or more glycopeptides to determine a hazard ratio and an interaction p-value for each glycopeptide; (g) identifying, by the computer, the glycopeptide having the interaction p-value ≤0.05 as a glycopeptide biomarker for predicting the disease or the condition.

[0264] Described herein are methods for assessing a status of a condition and a treatment in a subject, the method comprising: (a) fragmenting a glycoprotein in a sample from a subject into one or more glycopeptides, wherein the sample comprises one or more of glycoproteins, glycans, or glycopeptides; (b) performing mass spectroscopy (MS) on the one or more glycopeptides using multiple reaction monitoring mass spectrometry (MRM-MS) to quantify an amount of the one or more glycopeptides in the sample, wherein the one or more glycopeptides comprise one or more amino acid sequences selected from a group consisting of SEQ ID NOs:101-131, 159-207, and 21-46, and combinations thereof; (c) inputting data of the amount of the one or more glycopeptides into a trained model to generate an output probability, wherein the output probability is indicative of whether a treatment positively influences an outcome of the subject having a condition; and (d) generating a treatment recommendation based on the output probability, wherein the condition is melanoma and the treatment comprises checkpoint inhibitors. In some embodiments, the outcome comprises overall survival time. In some embodiments, the outcome comprises progression-free survival time. In some embodiments, the treatment comprises one or more of ipilimumab, nivolumab, and pembrolizumab. In some embodiments, the treatment comprises one or more of PD-1-, PD-L1-, and CTLA-4-inhibitors. In some embodiments, the treatment comprises chemotherapy. In some embodiments, the chemotherapy comprises one or more of carboplatin and pemetrexed. In some embodiments, the recommendation comprises continuing the treatment if the output probability indicates the treatment positively influences the outcome.

[0265] Provided herein are methods for assessing a status of a condition and a treatment in a subject, the method comprising: (a) fragmenting a glycoprotein in a sample from a subject into one or more glycopeptides, wherein the sample comprises one or more of glycoproteins, glycans, or glycopeptides; (b) performing mass spectroscopy (MS) on the one or more glycopeptides using multiple reaction monitoring mass spectrometry (MRM-MS) to quantify an amount of the one or more glycopeptides in the sample, wherein the one or more glycopeptides comprise one or more amino acid sequences selected from a group consisting of SEQ ID NOs: 101-131, 159-207, and 21-46, and combinations thereof; (c) inputting data of the amount of the one or more glycopeptides into a trained model to generate an output probability, wherein the output probability is indicative of whether a treatment positively influences an outcome of the subject having a condition; and (d) generating a treatment recommendation based on the output probability, wherein the condition is non-small cell lung cancer (NSCLC) and the treatment comprises checkpoint inhibitors. In some embodiments, the outcome comprises overall survival time. In some embodiments, the outcome comprises progression-free survival time. In some embodiments, the treatment comprises one or more of ipilimumab, nivolumab, and pembrolizumab. In some embodiments, the treatment comprises one or more of PD-1-, PD-L1-, and CTLA-4-inhibitors. In some embodiments, the treatment comprises chemotherapy. In some embodiments, the chemotherapy comprises one or more of carboplatin and pemetrexed. In some embodiments, the recommendation comprises continuing the treatment if the output probability indicates the treatment positively influences the outcome.

[0266] In some embodiments, provided herein are methods for identifying a classification for a sample, the method comprising: quantifying by mass spectroscopy (MS) one or more glycopeptides in a sample wherein the glycopeptides each, individually in each instance, comprises a glycopeptide consisting essentially of an amino acid sequence selected from the group consisting of SEQ ID NO: 101-131, 159-207, and 21-46, and combinations thereof; and inputting the quantification into a trained model to generate an output probability; determining if the output probability is above or below a threshold for a classification; and identifying a classification for the sample based on whether the output probability is above or below a threshold for a classification.

[0267] In some embodiments, provided herein are methods for training a machine-learning algorithm, comprising: providing a first data set of MRM transition signals indicative of a sample comprising a glycopeptide consisting of, or consisting essentially of, an amino acid sequence selected from the group consisting of SEQ ID NO: 101-131, 159-207, and 21-46; providing a second data set of MRM transition signals indicative of a control sample; and comparing the first data set with the second data set using a machine-learning algorithm.

[0268] In some embodiments, provided herein are methods for diagnosing a patient having cancer; the method comprising: obtaining a biological sample from the patient; performing mass spectroscopy of the biological sample using MRM-MS with a QQQ and/or qTOF spectrometer to detect and quantify one or more glycopeptides consisting essentially of an amino acid sequence selected from the group consisting of SEQ ID NO: 101-131, 159-207, and 21-46; or to detect and quantify one or more MRM transitions; inputting the quantification of the detected glycopeptides or the MRM transitions into a trained model to generate an output probability, determining if the output probability is above or below a threshold for a classification; identifying a diagnostic classification for the patient based on whether the output probability is above or below a threshold for a classification; and providing a recommendation for treatment. In some examples, the method includes performing mass spectroscopy of the biological sample using MRM-MS with a QQQ.

[0269] II. Biomarkers

[0270] Provided herein are glycopeptide biomarkers. These biomarkers are useful for a variety of applications, including, but not limited to, diagnosing diseases and conditions. For example, certain biomarkers set forth herein, or combinations thereof, are useful for diagnosing cancer. In some embodiments, the cancer is melanoma. In some embodiments, the cancer is non-small cell lung cancer (NSCLC). In some embodiments, the biomarkers are useful for diagnosing and screening patients having cancer, an autoimmune disease, or fibrosis. In some embodiments, the biomarkers are useful for classifying a patient so that the patient receives the appropriate medical treatment. In some embodiments, the biomarkers are useful for treating or ameliorating a disease or condition in patient by, for example, identifying a therapeutic agent with which to treat a patient. In some embodiments, the biomarkers are useful for determining a prognosis of treatment for a patient or a likelihood of success or survivability for a treatment regimen.

[0271] in some embodiments, a sample from a patient is analyzed by MS and the results are used to determine the presence, absolute amount, and/or relative amount of a glycopeptide consisting of an amino acid sequence selected from SEQ ID NO: 101-131, 159-207, and 21-46 in the sample. In some embodiments, a sample from a patient, is analyzed by MS and the results are used to determine the presence, absolute amount, and/or relative amount of a glycopeptide consisting essentially of an amino acid sequence selected from SEQ ID NO: 101-131, 159-207, and 21-46 in the sample. In some embodiments, a sample from a patient is analyzed by MS and the results are used to determine the presence, absolute amount, and/or relative amount of a glycopeptide consisting of, or consisting essentially of, an amino acid sequence selected from SEQ ID NO: 101-131, 159-207, and 21-46 in the sample. In some embodiments, a sample from a patient is analyzed by MS and the results are used to determine the presence, absolute amount, and/or relative amount of a glycopeptide consisting of, or consisting essentially of, an amino acid sequence selected from SEQ ID NO: 101-131, 159-207, and 21-46 in the sample. In some embodiments, the presence, absolute amount, and/or relative amount of a glycopeptide is determined by analyzing the MS results. In some embodiments, the MS results are analyzed using machine-learning.

[0272] Provided herein are biomarkers selected from glycans, peptides, glycopeptides, fragments thereof, and combinations thereof. In some embodiments, the glycopeptide comprise an amino acid sequence selected from SEQ ID NO: 101-131, 159-207, and 21-46. In some embodiments, the glycopeptide consists essentially of an amino acid sequence selected from SEQ ID NO: 101-131, 159-207, and 21-46.

### O-Glycosylation

[0273] In some examples, the glycopeptides set forth herein include O-glycosylated peptides. These peptides include glycopeptides in which a glycan is bonded to the peptide through an oxygen atom of an amino acid. Typically, the amino acid to which the glycan is bonded is threonine (T) or serine (S). In some examples, the amino acid to which the glycan is bonded is threonine (T). In some examples, the amino acid to which the glycan is bonded is serine (S).

[0274] In certain examples, the 0-glycosylated peptides include those peptides from the group selected from Apolipoprotein C-Ill (APOC3), Alpha-2-HS-glycoprotein (FETUA.), and combinations thereof. In certain examples, the O-glycosylated peptide, set forth herein, is an Apolipoprotein (APOC3) peptide. In certain examples, the O-glycosylated peptide, set forth herein, is an Alpha-2-HS-glycoprotein (FETUA).

### N-Glycosylation

[0275] In some examples, the glycopeptides set forth herein include N-glycosylated peptides. These peptides include glycopeptides in which a glycan is bonded to the peptide through a nitrogen atom of an amino acid. Typically, the amino acid to which the glycan is bonded is asparagine (N) or arginine (R). In some examples, the amino acid to which the glycan is bonded is asparagine (N). In some examples, the amino acid to which the glycan is bonded is arginine (R).

[0276] In certain examples, the N-glycosylated peptides include members selected from the group consisting of Alpha-1-antitrypsin (A1AT), Alpha-1B-glycoprotein (A1BG), Leucine-richAlpha-2-glycoprotein (A2GL), Alpha-2-macroglobulin (A2MG), Alpha-1-antichymotrypsin (AACT), Afamin (AFAM), Alpha-1-acid glycoprotein 1 & 2 (AGP12), Alpha-1-acid glycoprotein 1 (AGP1), Alpha-1-acid glycoprotein 2 (AGP2), Apolipoprotein A-I (APOA1), Apolipoprotein B-100 (APOB), Apolipoprotein D (APOD), Beta-2-glycoprotein-1 (APOH), Apolipoprotein M (APOM), Attractin (ATRN), Calpain-3 (CAN3), Ceruloplasmin (CERU), Complement Factor H (CFAH), Complement Factor I (CFAI), Clusterin (CLU), ComplementC3 (CO3), ComplementC4-A&B (CO4A&CO4B), ComplementcomponentE6 (CO6),

[0277] ComplementComponentC8AChain (CO8A), Coagulation factor XII (FA12),

[0278] Haptoglobin (HPT), Histidine-rich Glycoprotein (HRG), Immunoglobulin heavy constant alpha 1&2 (IgA12), Immunoglobulin heavy constant alpha 2 (IgA2).

[0279] Immunoglobulin heavy constant gamma 2 (IgG2), Immunoglobulin heavy constant mu (IgM), Inter-alpha-trypsin inhibitor heavy chain H1 (ITIH1), Plasma Kallikrein (KLKB1),

[0280] Kininogen-1 (KNG1), Serum paraoxonase/arylesterase 1 (PON1), Selenoprotein P (SEPP1), Prothrombin (THRB), Serotransferrin (TREE), Transthyretin (TTR), Protein unc-13HomologA (UN13A), Vitronectin (VTNC), Zinc-alpha-2-glycoprotein (ZA2G), growth factor-II (IGF2), Apolipoprotein C-I (APOC1), Hemopexin (HEMO), Immunoglobulin heavy constant gamma 1 (IgG1), Immunoglobulin J chain (0.10), and combinations thereof.

### Peptides and Glycopeptides

[0281] In some examples, set forth herein is a glycopeptide or peptide consisting of an amino acid sequence selected from the group consisting of SEQ ID NO: 101-131, 159-207, and 21-46, and combinations thereof.

[0282] In some examples, set forth herein is a glycopeptide or peptide consisting essentially of an amino acid sequence selected from the group consisting of SEQ ID NO: 101-131, 159-207, and 21-46, and combinations thereof.

[0283] III. Methods

[0284] Provided herein are methods of identifying the glycoproteomic biomarkers and signatures that may be used to predict which cancer patients respond to immune checkpoint blockade treatment, such as PD1/PDL1 checkpoint inhibitors, and have an improvement or a positive change in their condition.

[0285] In some embodiments, individual glycopeptide expression levels are associated with various timepoints to determine which glycopeptides changed with events, such as death or metastasis, at the various timepoints. In some embodiments, individual glycopeptide expression levels are associated with time from treatment initiation to progression/metastasis (progression-free survival, PFS) or death (overall survival, OS) in the patient cohorts. In some embodiments, examples of individual glycopeptide expression levels are shown in FIGS. 16-80.

[0286] In some embodiments, multivariable models are used predict OS and PFS in cancer patients. In some embodiments, the cancer patients have NSCLC or melanoma. In some embodiments, a small subset of glycopeptides for modeling are selected, a model with n−1 patients from a total of n patients is built, a survival score on the one holdout patient is predicted, and the step are iterated over all patients as individual holdouts, to generate unbiased prediction scores for everyone (a leave-one-out cross-validation approach, LOOCV). In some embodiments, the resulting scores are dichotomized at a cutoff which optimizes Harrell's C-index. In some embodiments, Kaplan-Meier (KM) curves were plotted for each glycopeptide.

[0287] In some embodiments, hazard ratio (HR), p-value, and interaction P-value were calculated. In some embodiments, hazard ratio (HR) is calculated from a Cox Proportional Hazards model, representing the multiplicative increase in odds of death or progression-free survival time for each increase of the biomarker by 1 unit. In some embodiments, p-value is associated with the HR above. In some embodiments, P<0.01 was considered significant. In some embodiments, P≤0.05, P≤0.01, P≤0.005, or P≤0.001 was considered significant. In some embodiments, interaction P-value is associated with the biomarker x treatment interaction; significance indicates potential for use in treatment selection.

[0288] In some embodiments, the model helped to determine whether the glycopeptide marker individually predictive of OS. In some embodiments, the model helped to determine whether the glycopeptide marker individually predictive of PFS. In some embodiments, the model helped to determine whether the glycopeptide marker individually is of use in treatment selection or varied with and without treatment. In some embodiments, individual Kaplan-Meier (KM) curves are plotted for the markers relevant in each disease for each outcome, such as OS or PFS. In some embodiments, hazard ratios and p-values on the plots are representative of the plotted high/low split at median biomarker expression. Examples of individual KM curves are shown in FIGS. 16-80 for melanoma and NSCLC. FIGS. 16-41 show overall survival (OS) Kaplan-Meier curves of patients with metastatic melanoma for various glycopeptide fragments. FIGS. 42-80 show progression-free survival (PFS) Kaplan-Meier curves of patients with metastatic melanoma for various glycopeptide fragments. Examples of such multivariate KM curves generated from the individual KM curves are seen in FIGS. 14A, 14B, 15A, and 15B. FIGS. 81A and 81B illustrate an algorithm development pipeline for identifying non-small-cell lung cancer (NSCLC), in accordance with the presently disclosed embodiments. FIGS. 82A and 82B illustrate a multivariate classifier development for case-control studies for identifying non-small-cell lung cancer (NSCLC), in accordance with the presently disclosed embodiments. FIGS. 83A-83D illustrate scoring prediction curves for identifying non-small-cell lung cancer (NSCLC), in accordance with the presently disclosed embodiments.

[0289] In some embodiments, patients are treated with a therapeutically effective amount of an immune-therapeutic. In some embodiments, the immune-therapeutic comprises an immune checkpoint inhibitor. In some embodiments, the checkpoint inhibitor comprises PD-1 inhibitors, PD-L1 inhibitors, or CTLA-4 inhibitors, or combinations thereof.

[0290] In some embodiments, patients are treated with a therapeutically effective amount of a targeted therapeutic agent. In some embodiments, the targeted therapeutic agent is a drug that targets blood vessel that targets vascular endothelial growth factor (VEGF) such as bevacizumab, ramucirumab, and ziv-aflibercept. In some embodiments, the targeted therapeutic agent comprises an epidermal growth factor receptor (EGFR). In some embodiments, the EGFR comprises cetuximab or panitumumab. In some embodiments, the targeted therapeutic agent comprises a kinase inhibitor. In some embodiments, the kinase inhibitor comprises regorafenib.

[0291] In some embodiments, the patient is treated with a targeted therapy. In some embodiments, the methods herein include administering a therapeutically effective amount of one or more of 5-fluorouracil (5-FU); capecitabine, irinotecan, oxaliplatin, trifluridine, or tipiracil.

### Methods for Detecting Glycopeptides

[0292] In some embodiments, provided herein are methods for detecting one or more a multiple-reaction-monitoring (MRM) transition, comprising: obtaining a biological sample from a patient, wherein the biological sample comprises one or more glycopeptides; digesting and/or fragmenting a glycopeptide in the sample; and detecting a multiple-reaction-monitoring (MRM) transition.

[0293] In some embodiments, provided herein are methods of detecting one or more glycopeptides, wherein each glycopeptide is individually in each instance selected from a glycopeptide consisting of an amino acid sequence selected from the group consisting of SEQ ID NOs: 21-46, 101-131, and 159-207, and combinations thereof. In some embodiments, provided herein are methods of detecting one or more glycopeptides, wherein each glycopeptide is individually in each instance selected from a glycopeptide consisting essentially of an amino acid sequence selected from the group consisting of SEQ ID NO: 101-131, 159-207, and 21-46, and combinations thereof.

[0294] In some embodiments, provided herein are methods of detecting one or more glycopeptides. In some examples, set forth herein is a method of detecting one or more glycopeptide fragments. In certain examples, the method includes detecting the glycopeptide group to which the glycopeptide, or fragment thereof, belongs. In some of these examples, the glycopeptide group is selected from Alpha-1-antitrypsin (A1AT), Alpha-1B-glycoprotein (A1BG), Leucine-richAlpha-2-glycoprotein (A2GL), Alpha-2-macroglobulin (A2MG), Alpha-1-antichymotrypsin (AACT), Afamin (AFAM), Alpha-1-acid glycoprotein 1 & 2 (AGP12), Alpha-1-acid glycoprotein 1 (AGP1), Alpha-1-acid glycoprotein 2 (AGP2), Apolipoprotein A-I (APOA1), Apolipoprotein C-III (APOC3), Apolipoprotein B-100 (APOB), Apolipoprotein D (APOD), Beta-2-glycoprotein-1 (APOH), Apolipoprotein M (APOM), Attractin (ATRN), Calpain-3 (CAN3), Ceruloplasmin (CERU), Complement Factor H (CFAH), Complement Factor I (CFAI), Clusterin (CLUS), ComplementC3 (CO3), ComplementC4-A&B (CO4A&CO4B), ComplementcomponentC6 (CO6), ComplementComponentC8AChain (CO8A), Coagulation factor XII (FA12), Alpha-2-HS-glycoprotein (FETUA), Haptoglobin (HPT), Histidine-rich Glycoprotein (HRG), Immunoglobulin heavy constant alpha 1&2 (IgA12), Immunoglobulin heavy constant alpha 2 (IgA2), Immunoglobulin heavy constant gamma 2 (IgG2), Immunoglobulin heavy constant mu (IgM), Inter-alpha-trypsin inhibitor heavy chain H1 (ITIH1), Plasma Kallikrein (KLKB1), Kininogen-1 (KNG1), Serum paraoxonase/arylesterase 1 (PON1), Selenoprotein P (SEPP1), Prothrombin (THRB), Serotransferrin (TRFE), Transthyretin (TTR), Protein unc-13HomologA (UN13A), Vitronectin (VTNC), Zinc-alpha-2-glycoprotein (ZA2G), Insulin-like growth factor-II (IGF2), Apolipoprotein C-I (APOC1), and combinations thereof.

[0295] In some embodiments, provided herein are methods comprising detecting a glycopeptide, a glycan on the glycopeptide and the glycosylation site residue where the glycan bonds to the glycopeptide. In some embodiments, the method includes detecting a glycan residue. In some embodiments, the method includes detecting a glycosylation site on a glycopeptide. In some embodiments, this process is accomplished with mass spectroscopy used in tandem with liquid chromatography.

[0296] In some embodiments, provided herein are methods comprising obtaining a biological sample from a patient. In some examples, the biological sample is synovial fluid, whole blood, blood serum, blood plasma, urine, sputum, tissue, saliva, tears, spinal fluid, tissue section(s) obtained by biopsy; cell(s) that are placed in or adapted to tissue culture; sweat, mucous, fecal material, gastric fluid, abdominal fluid, amniotic fluid, cyst fluid, peritoneal fluid, pancreatic juice, breast milk, lung lavage, bone marrow, gastric acid, bile, semen, pus, aqueous humor, transudate, or combinations of the foregoing. In some examples, the biological sample is selected from the group consisting of blood, plasma, saliva, mucus, urine, stool, tissue, sweat, tears, hair, or a combination thereof. In some examples, the biological sample is a blood sample. In some examples, the biological sample is a plasma sample. In some examples, the biological sample is a saliva sample. In some examples, the biological sample is a mucus sample. In some examples, the biological sample is a urine sample. In some examples, the biological sample is a stool sample. In some examples, the biological sample is a sweat sample. In some examples, the biological sample is a tear sample. In some examples, the biological sample is a hair sample.

[0297] In some examples, the method comprises digesting and/or fragmenting a glycopeptide in the sample. In some examples, the method includes digesting a glycopeptide in the sample. In some examples, the method includes fragmenting a glycopeptide in the sample. In some examples, the digested or fragmented glycopeptide is analyzed using mass spectroscopy. In some examples, the glycopeptide is digested or fragmented in the solution phase using digestive enzymes. In some examples, the glycopeptide is digested or fragmented in the gaseous phase inside a mass spectrometer, or the instrumentation associated with a mass spectrometer. In some examples, the mass spectroscopy results are analyzed using machine-learning algorithms. In some examples, the mass spectroscopy results are the quantification of the glycopeptides, glycans, peptides, and fragments thereof. In some examples, this quantification is used as an input in a trained model to generate an output probability. The output probability is a probability of being within a given category or classification, e.g., the classification of having cancer or the classification of not having cancer. In some other examples, the output probability is a probability of being within a given category or classification, e.g., the classification of having cancer or the classification of not having cancer. In some examples, the output probability is a probability of being within a given category or classification, e.g., the classification of having an autoimmune disease or the classification of not having an autoimmune disease. In some examples, the output probability is a probability of being within a given category or classification, e.g., the classification of having fibrosis or the classification of not having fibrosis.

[0298] In some examples, the mass spectroscopy is performed using multiple reaction monitoring (MRM) mode. In some examples, the mass spectroscopy is performed using qTOF MS in data-dependent acquisition. In some examples, the mass spectroscopy is performed using or MS-only mode.

[0299] In some examples, the method comprises introducing the sample, or a portion thereof, into a mass spectrometer. In some examples, the method comprises fragmenting a glycopeptide in the sample after introducing the sample, or a portion thereof, into the mass spectrometer. In some examples, the method includes digesting a glycopeptide in the sample occurs before introducing the sample, or a portion thereof, into the mass spectrometer. In some examples, the method comprises fragmenting a glycopeptide in the sample to provide a glycopeptide ion, a peptide ion, a glycan ion, a glycan adduct ion, or a glycan fragment ion. In some examples, the method comprises digesting and/or fragmenting a glycopeptide in the sample to provide one or more glycopeptides consisting of an amino acid sequence selected from the group consisting of SEQ ID NO: 101-131, 159-207, and 21-46, and combinations thereof. In some examples, the method comprises digesting and/or fragmenting a glycopeptide in the sample to provide one or more glycopeptides consisting essentially of an amino acid sequence selected from the group consisting of SEQ ID NO: 101-131, 159-207, and 21-46, and combinations thereof.

[0300] In some examples, the method includes detecting an MRM transition indicative of a glycopeptide or glycan residue, wherein the glycopeptide consists essentially of an amino acid sequence selected from the group consisting of SEQ ID NO: 101-131, 159-207, and 21-46 and combinations thereof. In some examples, the method includes detecting an MRM transition indicative of a glycopeptide consisting essentially of an amino acid sequence selected from the group consisting of SEQ ID NO: 101-131, 159-207, and 21-46 and combinations thereof.. In some examples, the method includes detecting more than one MRM transition indicative of a combination of glycopeptides having amino acid sequences selected from a combination of SEQ ID NO: 101-131, 159-207, and 21-46.

[0301] In some examples, the method includes detecting a MRM transition indicative of a glycopeptide or glycan residue, wherein the glycopeptide consists essentially of an amino acid sequence selected from the group consisting of SEQ ID NO: 101-131, 159-207, and 21-46, and combinations thereof. In some examples, the method includes detecting a MRM transition indicative of a glycopeptide consisting essentially of an amino acid sequence selected from the group consisting of SEQ ID NO: 101-131, and combinations thereof. In some examples, the method includes detecting a MRM transition indicative of a glycopeptide consisting essentially of an amino acid sequence selected from the group consisting of SEQ ID NO: 159-207, and combinations thereof. In some examples, the method includes detecting a MRM transition indicative of a glycopeptide consisting essentially of an amino acid sequence selected from the group consisting of SEQ ID NO: 21-46, and combinations thereof.

[0302] In some examples, the method includes detecting a MRM transition indicative of a glycopeptide or glycan residue, wherein the glycopeptide consists essentially of an amino acid sequence selected from the group consisting of SEQ ID NOs: 221-46, and combinations thereof. In some examples, the method includes detecting a MRM transition indicative of a glycopeptide consisting essentially of an amino acid sequence selected from the group consisting of SEQ ID NOs: 101-131, and combinations thereof.. In some examples, the method includes detecting a MRM transition indicative of a glycopeptide or glycan residue, wherein the glycopeptide consists essentially of an amino acid sequence selected from the group consisting of 159-207.

[0303] In some examples, the method comprises performing mass spectroscopy on the biological sample using multiple-reaction-monitoring mass spectroscopy (MRM-MS).

[0304] In some examples, the method includes digesting a glycoprotein in the sample to provide one or more glycopeptides consisting essentially of an amino acid sequence selected from the group consisting of SEQ ID NO: 101-131, 159-207, and 21-46, and combinations thereof. In some examples, the biological sample is combined with chemical reagents. In some examples, the biological sample is combined with enzymes. In some examples, the enzymes are lipases. In some examples, the enzymes are proteases. In some examples, the enzymes are serine proteases. In some examples, the enzyme is selected from the group consisting of trypsin, chymotrypsin, thrombin, elastase, and subtilisin. In some examples, the enzyme is trypsin. In some examples, the methods comprises contacting at least two proteases with a glycopeptide in a sample. In some examples, the at least two proteases are selected from the group consisting of serine protease, threonine protease, cysteine protease, aspartate protease. In some examples, the at least two proteases are selected from the group consisting of trypsin, chymotrypsin, endoproteinase, Asp-N, Arg-C, Glu-C, Lys-C, pepsin, thermolysin, elastase, papain, proteinase K, subtilisin, clostripain, and carboxypeptidase protease, glutamic acid protease, metalloprotease, and asparagine peptide lyase.

[0305] In some examples, the method includes detecting an MRM transition indicative of a glycopeptide or glycan residue, wherein the glycopeptide consisting of, or consisting essentially of, an amino acid sequence selected from the group consisting of SEQ ID NO: 101-131, 159-207, and 21-46 and combinations thereof. In some examples, the method includes detecting an MRM transition indicative of a glycopeptide or glycan residue, wherein the glycopeptide consists essentially of an amino acid sequence selected from the group consisting of SEQ ID NO: 101-131, 159-207, and 21-46 and combinations thereof. In some examples, the method includes detecting an MRM transition indicative of a glycopeptide consisting essentially of an amino acid sequence selected from the group consisting of SEQ ID NO: 101-131, 159-207, and 21-46 and combinations thereof. In some examples, the method includes detecting more than one MRM transition indicative of a combination of glycopeptides having amino acid sequences selected from a combination of SEQ ID NO: 101-131, 159-207, and 21-46.

[0306] In some examples, the method includes detecting a MRM transition indicative of a glycopeptide or glycan residue, wherein the glycopeptide consists essentially of an amino acid sequence selected from the group consisting of SEQ ID NO: 101-131, 159-207, and 21-46, and combinations thereof.

[0307] In some examples, the method comprises performing mass spectroscopy on the biological sample using multiple-reaction-monitoring mass spectroscopy (MRM-MS).

[0308] In some examples, the method comprises digesting a glycopeptide in the sample to provide a glycopeptide consisting of an amino acid sequence selected from the group consisting of SEQ ID NO: 101-131, 159-207, and 21-46, and combinations thereof. In some examples, the biological sample is contacted with one or more chemical reagents. In some examples, the biological sample is contacted with one or more enzymes. In some examples, the enzymes are lipases. In some examples, the enzymes are proteases. In some examples, the enzymes are serine proteases. In some examples, the enzyme is selected from the group consisting of trypsin, chymotrypsin, thrombin, elastase, and subtilisin. In some of these examples, the enzyme is trypsin. In some examples, the methods include contacting at least two proteases with a glycopeptide in a sample. In some examples, the at least two proteases are selected from the group consisting of serine protease, threonine protease, cysteine protease, aspartate protease. In some examples, the at least two proteases are selected from the group consisting of trypsin, chymotrypsin, endoproteinase, Asp-N, Arg-C, Glu-C, Lys-C, pepsin, thermolysin, elastase, papain, proteinase K, subtilisin, clostripain, and carboxypeptidase protease, glutamic acid protease, metalloprotease, and asparagine peptide lyase.

[0309] In some examples, the method includes conducting tandem liquid chromatography-mass spectroscopy on the biological sample. In some examples, the method includes multiple-reaction-monitoring mass spectroscopy (MRM-MS) mass spectroscopy on the biological sample. In some examples, the method includes detecting an MRM transition using a triple quadrupole (QQQ) and/or a quadrupole time-of-flight (qTOF) mass spectrometer. In some examples, the method includes detecting an MRM transition using a QQQ mass spectrometer. In some examples, the method includes detecting using a qTOF mass spectrometer. In some examples, a suitable instrument for use with the instant methods is an Agilent 6495B Triple Quadrupole LC/MS. In some examples, the method includes detecting using a QQQ mass spectrometer. In some examples, a suitable instrument for use with the instant methods is an Agilent 6545 LC/Q-TOF.

[0310] In some examples, the method comprises detecting more than one MRM transition using a QQQ and/or qTOF mass spectrometer. In some examples, the method includes detecting more than one MRM transition using a QQQ mass spectrometer. In some examples, the method includes detecting more than one MRM transition using a qTOF mass spectrometer. In some examples, the method includes detecting more than one MRM transition using a QQQ mass spectrometer.

[0311] In some examples, the methods herein include quantifying one or more glycomic parameters of the one or more biological samples comprises employing a coupled chromatography procedure. In some examples, these glycomic parameters include the identification of a glycopeptide group, identification of glycans on the glycopeptide, identification of a glycosylation site, identification of part of an amino acid sequence which the glycopeptide includes. In some examples, the coupled chromatography procedure comprises: performing or effectuating a liquid chromatography-mass spectrometry (LC-MS) operation. In some examples, the coupled chromatography procedure comprises: performing or effectuating a multiple reaction monitoring mass spectrometry (MRM-MS) operation. In some examples, the methods herein include a coupled chromatography procedure which comprises: performing or effectuating a liquid chromatography-mass spectrometry (LC-MS) operation; and effectuating a multiple reaction monitoring mass spectrometry (MRM-MS) operation. In some examples, the methods include training a machine-learning algorithm using one or more glycomic parameters of the one or more biological samples obtained by one or more of a triple quadrupole (QQQ) mass spectrometry operation and/or a quadrupole time-of-flight (qTOF) mass spectrometry operation. In some examples, the methods include training a machine-learning algorithm using one or more glycomic parameters of the one or more biological samples obtained by a triple quadrupole (QQQ) mass spectrometry operation. In some examples, the methods include training a machine-learning algorithm using one or more glycomic parameters of the one or more biological samples obtained by a quadrupole time-of-flight (qTOF) mass spectrometry operation. In some examples, the methods include quantifying one or more glycomic parameters of the one or more biological samples comprises employing one or more of a triple quadrupole (QQQ) mass spectrometry operation and a quadrupole time-of-flight (qTOF) mass spectrometry operation. In some examples, machine-learning algorithms are used to quantify these glycomic parameters. In some examples, including any of the foregoing, the mass spectroscopy is performed using multiple reaction monitoring (MRM) mode. In some examples, the mass spectroscopy is performed using qTOF MS in data-dependent acquisition. In some examples, the mass spectroscopy is performed using or MS-only mode.

[0312] In some examples, the method includes detecting one or more MRM transitions indicative of glycans. In some examples, the method comprises quantifying a glycan. In some examples, the method comprises quantifying a first glycan and quantifying a second glycan; and further comprising comparing the quantification of the first glycan with the quantification of the second glycan. In some examples, the method comprises associating the detected glycan with a peptide residue site, whence the glycan was bonded. In some examples, the method comprises generating a glycosylation profile of the sample. In some examples, the method comprises associating the detected glycan with a timepoint.

[0313] In some examples, the method includes spatially profiling glycans on a tissue section associated with the sample. In some examples, including any of the foregoing, the method includes spatially profiling glycopeptides on a tissue section associated with the sample. In some examples, the method includes matrix-assisted laser desorption ionization time-of-flight mass spectrometry (MALDI-TOF) mass spectroscopy in combination with the methods herein.

[0314] In some examples, the method includes quantifying relative abundance of a glycan and/or a peptide.

[0315] In some examples, the method includes normalizing the amount of a glycopeptide by quantifying a glycopeptide consisting essentially of an amino acid sequence selected from the group consisting of SEQ ID NO: 101-131, 159-207, and 21-46, and combinations thereof and comparing that quantification to the amount of another chemical species. In some examples, the method includes normalizing the amount of a peptide by quantifying a glycopeptide consisting of an amino acid sequence selected from the group consisting of SEQ ID NO: 101-131, 159-207, and 21-46, and combinations thereof, and comparing that quantification to the amount of another glycopeptide consisting of an amino acid sequence selected from the group consisting of SEQ ID NO: 101-131, 159-207, and 21-46. In some examples, the method includes normalizing the amount of a peptide by quantifying a glycopeptide consisting essentially of an amino acid sequence selected from the group consisting of SEQ ID NO: 101-131, 159-207, and 21-46, and combinations thereof, and comparing that quantification to the amount of another glycopeptide consisting essentially of an amino acid sequence selected from the group consisting of SEQ ID NO: 101-131, 159-207, and 21-46.

### Methods for Classifying Samples Comprising Glycopeptides

[0316] In some embodiment, provided herein are methods for identifying a classification for a sample, the method comprising: quantifying by mass spectroscopy (MS) one or more glycopeptides in a sample wherein the glycopeptides each, individually in each instance, comprises a glycopeptide consisting essentially of an amino acid sequence selected from the group consisting of, or consisting essentially of SEQ ID NO: 101-131, 159-207, and 21-46, and combinations thereof; and inputting the quantification into a trained model to generate a output probability; determining if the output probability is above or below a threshold for a classification; and identifying a classification for the sample based on whether the output probability is above or below a threshold for a classification.

[0317] In some examples, provided herein are methods for identifying glycopeptide biomarkers, comprising: obtaining a biological sample from a patient; digesting and/or fragmenting a glycopeptide in the sample; detecting a multiple-reaction-monitoring (MRM) transition; and classifying the glycopeptides based on the MRM transitions detected. In some examples, a machine-learning algorithm is used to train a model using the analyzed the MRM transitions as inputs. In some examples, a machine-learning algorithm is trained using the MRM transitions as a training data set. In some examples, the methods herein include identifying glycopeptides, peptides, and glycans based on their mass spectroscopy relative abundance. In some examples, a machine-learning algorithm or algorithms select and/or identify peaks in a mass spectroscopy spectrum. In some examples, the MS is MRM-MS with a QQQ and/or qTOF mass spectrometer.

[0318] In some examples, including any of the foregoing, the mass spectroscopy is performed using multiple reaction monitoring (MRM) mode. In some examples, the mass spectroscopy is performed using qTOF MS in data-dependent acquisition. In some examples, the mass spectroscopy is performed using or MS-only mode.

[0319] In some examples, the machine-learning algorithm is selected from the group consisting of a deep learning algorithm, a neural network algorithm, an artificial neural network algorithm, a supervised machine-learning algorithm, a linear discriminant analysis algorithm, a quadratic discriminant analysis algorithm, a support vector machine algorithm, a linear basis function kernel support vector algorithm, a radial basis function kernel support vector algorithm, a random forest algorithm, a genetic algorithm, a nearest neighbor algorithm, k-nearest neighbors, a naive Bayes classifier algorithm, a logistic regression algorithm, or a combination thereof. In certain examples, the machine-learning algorithm is lasso regression.

[0320] In some examples, the method includes classifying a sample as within, or embraced by, a disease classification or a disease severity classification.

[0321] In some examples, the classification is identified with 80% confidence, 85% confidence, 90% confidence, 95% confidence, 99% confidence, or 99.9999% confidence.

[0322] In some examples, the method includes quantifying by MS the glycopeptide in a sample at a first time point; quantifying by MS the glycopeptide in a sample at a second time point; and comparing the quantification at the first time point with the quantification at the second time point.

[0323] In some examples, the method includes quantifying by MS a different glycopeptide in a sample at a third time point; quantifying by MS the different glycopeptide in a sample at a fourth time point; and comparing the quantification at the fourth time point with the quantification at the third time point.

[0324] In some examples, the method includes monitoring the health status of a patient.

[0325] In some examples, monitoring the health status of a patient includes monitoring the onset and progression of disease in a patient with risk factors such as genetic mutations, as well as detecting cancer recurrence.

[0326] In some examples, the method includes diagnosing a patient with a disease or condition based on the quantification. In some examples, the method includes treating the patient with a therapeutically effective amount of a therapeutic agent comprising one or more of a chemotherapeutic, an immunotherapy, a hormone therapy, a targeted therapy, a neoadjuvant therapy, and surgery. In some embodiments, the treatment comprises checkpoint inhibitors. In some examples, the method includes diagnosing an individual with a disease or condition based on the quantification. In some examples, the method includes treating the individual with a therapeutically effective amount of a treatment.

### Methods for Diagnosing Patients

[0327] In some examples, provided herein are methods for assessing a patient having a disease or condition, comprising measuring by mass spectroscopy a glycopeptide in a sample from the patient.

[0328] In another embodiment, provided herein are methods for assessing a patient having cancer; the method comprising: obtaining a biological sample from the patient; performing mass spectroscopy of the biological sample using MRM-MS with a QQQ and/or qTOF spectrometer to detect and quantify one or more glycopeptides consisting essentially of an amino acid sequence selected from the group consisting of SEQ ID NO: 101-131, 159-207, and 21-46; inputting the quantification of the detected glycopeptides or the MRM transitions into a trained model to generate an output probability, determining if the output probability is above or below a threshold for a classification; and identifying a diagnostic classification for the patient based on whether the output probability is above or below a threshold for a classification; and assessing the patient as having cancer based on the classification.

[0329] In another embodiment, set forth herein is a method for diagnosing a patient having cancer; the method comprising: inputting the quantification of detected glycopeptides or MRM transitions into a trained model to generate an output probability, determining if the output probability is above or below a threshold for a classification; and identifying a diagnostic classification for the patient based on whether the output probability is above or below a threshold for a classification; and assessing the patient as based on the classification. In some examples, the method includes obtaining a biological sample from the patient; performing mass spectroscopy of the biological sample using MRM-MS with a QQQ and/or qTOF spectrometer to detect and quantify one or more glycopeptides consisting essentially of an amino acid sequence selected from the group consisting of 21-46, 101-131, and 159-207.

[0330] In some examples, set forth herein is a method for assessing a patient having cancer; the method comprising: obtaining a biological sample from the patient; performing mass spectroscopy of the biological sample using MRM-MS with a QQQ and/or qTOF spectrometer to detect one or more glycopeptides consisting or, or consisting essentially of, an amino acid sequence selected from the group consisting of SEQ ID NO: 101-131, 159-207, and 21-46; analyzing the detected glycopeptides or the MRM transitions to identify a classification; and assessing the patient based on the diagnostic classification.

[0331] In some examples, set forth herein is a method for assessing a patient having cancer; the method comprising: analyzing detected or quantified glycopeptides or MRM transitions to identify a classification; and assessing the patient based on the classification. In some examples, the method includes obtaining a biological sample from the patient; and performing mass spectroscopy of the biological sample using MRM-MS with a QQQ and/or qTOF spectrometer to detect one or more glycopeptides consisting or, or consisting essentially of, an amino acid sequence selected from the group consisting of SEQ ID NO: 101-131, 159-207, and 21-46.

[0332] In some examples, set forth herein is a method for diagnosing, monitoring, or classifying aging in an individual; the method comprising: obtaining a biological sample from the patient; performing mass spectroscopy of the biological sample using MRM-MS with a QQQ and/or qTOF spectrometer to detect one or more glycopeptides consisting or, or consisting essentially of, an amino acid sequence selected from the group consisting of SEQ ID NO: 101-131, 159-207, and 21-46; analyzing the detected glycopeptides or the MRM transitions to identify a diagnostic classification; and diagnosing, monitoring, or classifying the individual as having an aging classification based on the diagnostic classification.

### Diseases and Conditions

[0333] Provided herein are biomarkers for diagnosing a variety of diseases and conditions. In some examples, the diseases and conditions include cancer. In some examples, the diseases and conditions are not limited to cancer.

[0334] In some embodiments, cancer refers to a physiological condition in a subject that is typically characterized by unregulated cell growth. Examples of cancer include, but are not limited to, melanoma, carcinoma, lymphoma, blastoma, sarcoma, and leukemia and metastases thereof. The term “metastasis” refers to the transference of disease-producing organisms or of malignant or cancerous cells to other parts of the body by way of the blood or lymphatic vessels or membranous surfaces. Non-limiting examples of such cancers include small-cell lung cancer, non-small cell lung cancer, adenocarcinoma of the lung, squamous carcinoma of the lung, melanoma, squamous cell cancer, cancer of the peritoneum, hepatocellular cancer, gastrointestinal cancer, pancreatic cancer, glioblastoma, cervical cancer, ovarian cancer, liver cancer, bladder cancer, hepatoma, breast cancer, colon cancer, colorectal cancer, endometrial or uterine carcinoma, salivary gland carcinoma, kidney cancer, liver cancer, prostate cancer, thyroid cancer, hepatic carcinoma and various types of head and neck cancer. The phrase “stage of disease” refers to the stages of cancer progression referred to as Stage I, II, III, or IV. Stage of disease indicates if metastasis has occurred in the subject.

[0335] In some examples, the “patient” described herein is equivalently described as an “individual.” For example, in some methods herein, set forth are biomarkers for monitoring or diagnosing a disease or a condition in an individual. In some of these examples, the individual is not necessarily a patient who has a medical condition in need of therapy.

### Machine-Learning Model

[0336] In some examples, the methods herein comprise quantifying one or more glycopeptides consisting essentially of an amino acid sequence selected from the group consisting of SEQ ID NO: 101-131, 159-207, and 21-46 using mass spectroscopy and/or liquid chromatography. In some examples, the quantification results are used as inputs in a trained model. In some examples, the quantification results are classified or categorized with a predictive algorithm based on the absolute amount, relative amount, and/or type of each glycan or glycopeptide quantified in the test sample, wherein the predictive algorithm is trained on corresponding values for each marker obtained from a population of individuals having known diseases or conditions. In some examples, the disease or condition is cancer. In some cases, the disease or condition is melanoma. In some cases, the disease or condition is NSCLC.

[0337] In some examples, including any of the foregoing, set forth herein is a method for training a machine-learning algorithm, comprising: providing a first data set of MRM transition signals indicative of a sample comprising a glycopeptide consisting essentially of an amino acid sequence selected from the group consisting of SEQ ID NO: 101-131, 159-207, and 21-46; providing a second data set of MRM transition signals indicative of a control sample; and comparing the first data set with the second data set using a machine-learning algorithm.

[0338] In some examples, the methods herein include using a sample comprising a glycopeptide consisting of an amino acid sequence selected from the group consisting of SEQ ID NO: 101-131, 159-207, and 21-46 is a sample from a patient having the disease or condition. In some examples, the methods herein include using a sample comprising a glycopeptide consisting essentially of an amino acid sequence selected from the group consisting of SEQ ID NO: 101-131, 159-207, and 21-46 is a sample from a patient having cancer. In some examples, the methods herein include using a control sample, wherein the control sample is a sample from a patient not having the disease or condition.

[0339] In some examples, the methods herein include using a sample comprising a glycopeptide consisting essentially of an amino acid sequence selected from the group consisting of SEQ ID NO: 101-131, 159-207, and 21-46, which is a pooled sample from one or more patients having the disease or condition. In some examples, the methods herein include using a control sample, which is a pooled sample from one or more patients not having the disease or condition.

[0340] In some examples, the methods include generating machine-learning models trained using mass spectrometry data (e.g., MRM-MS transition signals) from patients having a disease or condition and patients not having a disease or condition. In some examples, the disease or condition is cancer. In some examples, the methods include optimizing the machine-learning models by cross-validation with known standards or other samples. In some examples, the methods include qualifying the performance using the mass spectrometry data to form panels of glycans and glycopeptides with individual sensitivities and specificities. In certain examples, the methods include determining a confidence percent in relation to a diagnosis. In some examples, one to ten glycopeptides consisting essentially of an amino acid sequence selected from the group consisting of SEQ ID NO: 101-131, 159-207, and 21-46 may be useful for diagnosing a patient with the disease or condition with a certain confidence percent. In some examples, ten to fifty glycopeptides consisting essentially of an amino acid sequence selected from the group consisting of SEQ ID NO: 101-131, 159-207, and 21-46 may be useful for diagnosing a patient with the disease or condition with a higher confidence percent.

[0341] In some examples, including any of the foregoing, the methods include performing MRM-MS and/or LC-MS on a biological sample. In some examples, the methods include constructing, by a computing device, theoretical mass spectra data representing a plurality of mass spectra, wherein each of the plurality of mass spectra corresponds to one or more glycopeptides consisting essentially of an amino acid sequence selected from the group consisting of SEQ ID NO: 101-131, 159-207, and 21-46. In some examples, the methods include comparing, by the computing device, the mass spectra data with the theoretical mass spectra data to generate comparison data indicative of a similarity of each of the plurality of mass spectra to each of the plurality of theoretical target mass spectra associated with a corresponding glycopeptide of the plurality of glycopeptides.

[0342] In some examples, machine-learning algorithms are used to determine, by the computing device and based on the MRM-MS data, a distribution of a plurality of characteristic ions in the plurality of mass spectra; and determining, by the computing device and based on the distribution, whether one or more of the plurality of characteristic ions is a glycopeptide ion.

[0343] In some examples, the methods herein include training a predictive algorithm. Herein, training the predictive algorithm may refer to supervised learning of a predictive algorithm on the basis of values for one or more glycopeptides consisting of, or consisting essentially of, an amino acid sequence selected from the group consisting of SEQ ID NO: 101-131, 159-207, and 21-46. Training the predictive algorithm may refer to variable selection in a statistical model on the basis of values for one or more glycopeptides consisting essentially of an amino acid sequence selected from the group consisting of SEQ ID NO: 101-131, 159-207, and 21-46. Training a predictive algorithm may for example include determining a weighting vector in feature space for each category, or determining a function or function parameters.

[0344] In some examples, the machine-learning algorithm is selected from the group consisting of a deep learning algorithm, a neural network algorithm, an artificial neural network algorithm, a supervised machine-learning algorithm, a linear discriminant analysis algorithm, a quadratic discriminant analysis algorithm, a support vector machine algorithm, a linear basis function kernel support vector algorithm, a radial basis function kernel support vector algorithm, a random forest algorithm, a genetic algorithm, a nearest neighbor algorithm, k-nearest neighbors, a naive Bayes classifier algorithm, a logistic regression algorithm, or a combination thereof. In certain examples, the machine-learning algorithm is lasso regression.

[0345] In some examples, the machine-learning algorithm is LASSO, Ridge Regression, Random Forests, K-nearest Neighbors (KNN), Deep Neural Networks (DNN), and Principal Components Analysis (PCA). In certain examples, DNN's are used to process mass spec data into analysis-ready forms. In some examples, DNN's are used for peak picking from a mass spectra. In some examples, PCA is useful in feature detection.

[0346] In some examples, LASSO is used to provide feature selection.

[0347] In some examples, machine-learning algorithms are used to quantify peptides from each protein that are representative of the protein abundance. In some examples, this quantification includes quantifying proteins for which glycosylation is not measured.

[0348] In some examples, glycopeptide sequences are identified by fragmentation in the mass spectrometer and database search using Byonic software (Protein Metrics Inc).

[0349] In some examples, the methods herein include unsupervised learning to detect features of MRMS-MS data that represent known biological quantities, such as protein function or glycan motifs. In certain examples, these features are used as input for classifying by machine-learning. In some examples, the classification is performed using LASSO, Ridge Regression, or Random Forest nature.

[0350] In some examples, the methods herein include mapping input data (e.g., MRM transition peaks) to a value (e.g., a scale based on 0-100) before processing the value in an algorithm. For example, after an MRM transition is identified and the peak characterized, the methods herein include assessing the MS scans in an m/z and retention time window around the peak for a given patient. In some examples, the resulting chromatogram is integrated by a machine-learning algorithm that determines the peak start and stop points, and calculates the area bounded by those points and the intensity (height). The resulting integrated value is the abundance, which then feeds into machine-learning and statistical analyses training and data sets.

[0351] In some examples, machine-learning output, in one instance, is used as machine-learning input in another instance. For example, in addition to the PCA being used for a classification process, the DNN data processing feeds into PCA and other analyses. This results in at least three levels of algorithmic processing. Other hierarchical structures are contemplated within the scope of the instant disclosure.

[0352] In some examples, the methods include comparing the amount of each glycan or glycopeptide quantified in the sample to corresponding reference values for each glycan or glycopeptide in a predictive algorithm. In some examples, the methods include a comparative process by which the amount of a glycan or glycopeptide quantified in the sample is compared to a reference value for the same glycan or glycopeptide using a predictive algorithm. The comparative process may be part of a classification by a predictive algorithm. The comparative process may occur at an abstract level, e.g., in n-dimensional feature space or in a higher dimensional space.

[0353] In some examples, the methods herein include classifying a patient's sample based on the amount of each glycan or glycopeptide quantified in the sample with a predictive algorithm. In some examples, the methods include using statistical or machine-learning classification processes by which the amount of a glycan or glycopeptide quantified in the test sample is used to determine a category of health with a predictive algorithm. In some examples, the predictive algorithm is a statistical or machine-learning classification algorithm.

[0354] In some examples, classification by a predictive algorithm may include scoring likelihood of a panel of glycan or glycopeptide values belonging to each possible category, and determining the highest-scoring category. Classification by a predictive algorithm may include comparing a panel of marker values to previous observations by means of a distance function. Examples of predictive algorithms suitable for classification include random forests, support vector machines, logistic regression (e.g. multiclass or multinomial logistic regression, and/or algorithms adapted for sparse logistic regression). A wide variety of other predictive algorithms that are suitable for classification may be used, as known to a person skilled in the art.

[0355] In some examples, the methods herein include supervised learning of a predictive algorithm on the basis of values for each glycan or glycopeptide obtained from a population of individuals having a disease or condition (e.g., melanoma or NSCLS). In some examples, the methods include variable selection in a statistical model on the basis of values for each glycan or glycopeptide obtained from a population of individuals having the disease or condition. Training a predictive algorithm may for example include determining a weighting vector in feature space for each category, or determining a function or function parameters.

[0356] In one embodiment, the reference value is the amount of a glycan or glycopeptide in a sample or samples derived from one individual. Alternatively, the reference value may be derived by pooling data obtained from multiple individuals, and calculating an average (for example, mean or median) amount for a glycan or glycopeptide. Thus, the reference value may reflect the average amount of a glycan or glycopeptide in multiple individuals. Said amounts may be expressed in absolute or relative terms, in the same manner as described herein.

[0357] In some examples, the reference value may be derived from the same sample as the sample that is being tested, thus allowing for an appropriate comparison between the two. For example, if the sample is derived from urine, the reference value is also derived from urine. In some examples, if the sample is a blood sample (e.g. a plasma or a serum sample), then the reference value will also be a blood sample (e.g. a plasma sample or a serum sample, as appropriate). When comparing between the sample and the reference value, the way in which the amounts are expressed is matched between the sample and the reference value. Thus, an absolute amount can be compared with an absolute amount, and a relative amount can be compared with a relative amount. Similarly, the way in which the amounts are expressed for classification with the predictive algorithm is matched to the way in which the amounts are expressed for training the predictive algorithm.

[0358] When the amounts of the glycan or glycopeptide are determined, the method may comprise comparing the amount of each glycan or glycopeptide to its corresponding reference value. When the cumulative amount of one, some or all the glycan or glycopeptides are determined, the method may comprise comparing the cumulative amount to a corresponding reference value. When the amounts of the glycan or glycopeptides are combined with each other in a formula to form an index value, the index value can be compared to a corresponding reference index value derived in the same manner.

[0359] The reference values may be obtained either within (i.e., constituting a step of) or external to the (i.e., not constituting a step of) methods described herein. In some examples, the methods include a step of establishing a reference value for the quantity of the markers. In other examples, the reference values are obtained externally to the method described herein and accessed during the comparison step of the invention.

[0360] In certain embodiments, the lasso regression machine-learning model may be a regression model or other classification model that may be evaluated utilizing receiver operating characteristic (ROC) evaluation and/or area under curve (AOC) evaluation. For example, in certain embodiments, as will be further illustrated with respect to FIGS. 14A, 14B, 15A, and 15B, the ROC model evaluation may represent a plot of sensitivity rate (e.g., patient likely not responsive) against a plot of specificity rate (patient likely to be responsive) and may be further optimized based on an iterative tuning of hyperparameters of the lasso regression machine-learning model. The trained the lasso regression machine-learning model may be then utilized to predict patient overall survival (OS) and progression-free survival (PFS) patients with metastatic melanoma for various glycopeptide fragments and patients with non-small-cell lung cancer (NSCLC) for various glycopeptide fragments, in accordance with the presently disclosed embodiments.

[0361] In some examples, including any of the foregoing, training of a predictive algorithm may be obtained either within (i.e., constituting a step of) or external to (i.e., not constituting a step of) the methods set forth herein. In some examples, the methods include a step of training of a predictive algorithm. In some examples, the predictive algorithm is trained externally to the method herein and accessed during the classification step of the invention. The reference value may be determined by quantifying the amount of a glycan or glycopeptide in a sample obtained from a population of healthy individual(s). The predictive algorithm may be trained by quantifying the amount of a glycan or glycopeptide in a sample obtained from a population of healthy individual(s). As used herein, the term “healthy individual” refers to an individual or group of individuals who are in a healthy state, e.g., patients who have not shown any symptoms of the disease, have not been diagnosed with the disease and/or are not likely to develop the disease. Preferably said healthy individual(s) is not on medication affecting the disease and has not been diagnosed with any other disease. The one or more healthy individuals may have a similar sex, age and body mass index (BMI) as compared with the test individual. The reference value may be determined by quantifying the amount of a glycan or glycopeptide in a sample obtained from a population of individual(s) suffering from the disease. The predictive algorithm may be trained by quantifying the amount of a marker in a sample obtained from a population of individual(s) suffering from the disease. More preferably such individual(s) may have similar sex, age and body mass index (BMI) as compared with the test individual. The reference value may be obtained from a population of individuals suffering from cancer. The predictive algorithm may be trained by quantifying the amount of a glycan or glycopeptide in a sample obtained from a population of individuals suffering from cancer. Once the characteristic glycan or glycopeptide profile of cancer is determined, the profile of markers from a biological sample obtained from an individual may be compared to this reference profile to determine whether the test subject also has cancer. Once the predictive algorithm is trained to classify cancer, the profile of markers from a biological sample obtained from an individual may be classified by the predictive algorithm to determine whether the test subject is also at that particular stage of cancer.

### Kits

[0362] In some examples, including any of the foregoing, set forth herein is a kit comprising a glycopeptide standard, a buffer, and one or more glycopeptides consisting of an amino acid sequence selected from the group consisting of SEQ ID NO: 101-131, 159-207, and 21-46.

[0363] In some examples, including any of the foregoing, set forth herein is a kit comprising a glycopeptide standard, a buffer, and one or more glycopeptides consisting essentially of an amino acid sequence selected from the group consisting of SEQ ID NO: 101-131, 159-207, and 21-46.

[0364] In some examples, set forth herein is a kit comprising a glycopeptide standard, a buffer, and one or more glycopeptides consisting of an amino acid sequence selected from the group consisting of SEQ ID NO: 101-131, 159-207, and 21-46, and combinations thereof. In some examples, set forth herein is a kit comprising a glycopeptide standard, a buffer, and one or more glycopeptides consisting essentially of an amino acid sequence selected from the group consisting of SEQ ID NO: 101-131. In some examples, set forth herein is a kit comprising a glycopeptide standard, a buffer, and one or more glycopeptides consisting essentially of an amino acid sequence selected from the group consisting of SEQ ID NO: 159-207. In some examples, set forth herein is a kit comprising a glycopeptide standard, a buffer, and one or more glycopeptides consisting essentially of an amino acid sequence selected from the group consisting of SEQ ID NO: 21-46.

[0365] In some examples, set forth herein is a kit for diagnosing or monitoring cancer in an individual wherein the glycan or glycopeptide profile of a sample from said individual is determined and the measured profile is compared with a profile of a normal patient or a profile of a patient with a family history of cancer. In some examples, the kit comprises one or more glycopeptides consisting of an amino acid sequence selected from the group consisting SEQ ID NO: 101-131, 159-207, and 21-46. In some examples, the kit comprises one or more glycopeptides consisting essentially of an amino acid sequence selected from the group consisting of SEQ ID NO: 101-131, 159-207, and 21-46.

[0366] In some examples, set forth herein is a kit comprising the reagents for quantification of the oxidized, nitrated, and/or glycated free adducts derived from glycopeptides.

### Clinical Assays

[0367] In some examples, the biomarkers, methods, and/or kits may be used in a clinical setting for diagnosing patients. In some of these examples, the analysis of samples includes the use of internal standards. These standards may include one or more glycopeptides consisting of an amino acid sequence selected from the group consisting of SEQ ID NO: 101-131, 159-207, and 21-46. These standards may include one or more glycopeptides consisting essentially of an amino acid sequence selected from the group consisting of SEQ ID NO: 101-131, 159-207, and 21-46.

[0368] In a clinical setting, samples may be prepared (e.g., by digestion) to include one or more glycopeptides consisting of an amino acid sequence selected from the group consisting of SEQ ID NO: 101-131, 159-207, and 21-46. In a clinical setting, samples may be prepared (e.g., by digestion) to include one or more glycopeptides consisting essentially of an amino acid sequence selected from the group consisting of SEQ ID NO: 101-131, 159-207, and 21-46. In some examples, the amount of a glycan or glycopeptide may be assessed by comparing the amount of one or more glycopeptides consisting of an amino acid sequence selected from the group consisting of SEQ ID NO: 101-131, 159-207, and 21-46 to the concentration of another biomarker. In some examples, the amount of a glycan or glycopeptide may be assessed by comparing the amount of one or more glycopeptides consisting essentially of an amino acid sequence selected from the group consisting of SEQ ID NO: 101-131, 159-207, and 21-46 to the concentration of another biomarker.

[0369] In some examples, the amount of a glycan or glycopeptide may be assessed by comparing the amount of one or more glycopeptides consisting of an amino acid sequence selected from the group consisting of SEQ ID NOs: 300-429 the amount of one or more glycopeptides consisting of an amino acid sequence selected from the group consisting of SEQ ID NOs: 300-429.

[0370] In some examples, the amount of a glycan or glycopeptide may be assessed by comparing the amount of one or more glycopeptides consisting essentially of an amino acid sequence selected from the group consisting of SEQ ID NO: 101-131, 159-207, and 21-46 to the amount of one or more glycopeptides consisting essentially of an amino acid sequence selected from the group consisting of SEQ ID NO: 101-131, 159-207, and 21-46.

[0371] In some examples, including any of the foregoing, the kit may include software for computing the normalization of a glycopeptide MRM transition signal.

[0372] In some examples, including any of the foregoing, the kit may include software for quantifying the amount of a glycopeptide consisting of, or consisting essentially of, an amino acid sequence selected from the group consisting of SEQ ID NO: 101-131, 159-207, and 21-46. In some examples, including any of the foregoing, the kit may include software for quantifying the relative amount of a glycopeptide consisting of, or consisting essentially of, an amino acid sequence selected from the group consisting of SEQ ID NO: 101-131, 159-207, and 21-46.

[0373] In some examples, including any of the foregoing, a trained model is stored on a server which is accessed by a clinician performing a method, set forth herein. In some examples, the clinician inputs the quantification of the MRM transition signals from a patient's sample into a trained model which are stored on a server. In some examples, the server is accessed by the internet, wireless communication, or other digital or telecommunication methods.

[0374] In some examples, including any of the foregoing, a trained model is stored on a server which is accessed by a clinician performing a method, set forth herein. In some examples, the clinician inputs the quantification of the glycopeptide or glycopeptides consisting of, or consisting essentially of, an amino acid sequence selected from the group consisting of SEQ ID NO: 101-131, 159-207, and 21-46 from a patient's sample into a trained model which are stored on a server.

[0375] In some examples, the server is accessed by the internet, wireless communication, or other digital or telecommunication

[0376] Individual KM curves may be plotted for the markers relevant in for the disease interest in four files. Hazard ratios and p-values on the plots are representative of the plotted high/low split at median biomarker expression. FIGS. 14A and 14B show progression-free survival (PFS) Kaplan-Meier curves of patients with metastatic melanoma for various glycopeptide fragments. FIGS. 15A and 15B show progression-free survival (PFS) Kaplan-Meier curves of patients with non-small-cell lung cancer (NSCLC) for various glycopeptide fragments. FIGS. 16-41 show overall survival (OS) Kaplan-Meier curves of patients with metastatic melanoma for various glycopeptide fragments of interest for melanoma. FIGS. 42-80 show progression-free survival (PFS) Kaplan-Meier curves of patients with metastatic melanoma for various glycopeptide fragments for melanoma.

[0377] IV. Additional Proteins and Glycopeptides

TABLE 12
Glycopeptides associated with melanoma

| | | | | Linking | |
|---|---|---|---|---|---|
| | | | | Site Pos. | Glycan |
| SEQ ID | Transition | Peptide Structure | | in Peptide | Structure |
| NO: | Number | (PS) NAME | Peptide Sequence | Sequence | GL NO. |
| SEQ ID | 101 | QUANTPEP.A2GL_ | DLLLPQPDLR | | N/A |
| NO: 101 | | DLLLPQPDLR | | | |
| SEQ ID | 102 | QUANTPEP.ANGT_ | SLDFTELDVAAEK | | N/A |
| NO: 102 | | SLDFTELDVAAEK | | | |
| SEQ ID | 103 | A1AT_70_5412 | QLAHQSNSTNIFFSPV | 1 | 5412 |
| NO: 103 | | | SIATAFAMLSLGTK | | |
| SEQ ID | 104 | HPT_184_5412 | MVSHHNLTTGATLIN | 1 | 5412 |
| NO: 104 | | | EQWLLTTAK | | |
| SEQ ID | 105 | HPT_241_6513 | VVLHPNYSQVDIGLIK | 3 | 6513 |
| NO: 105 | | | | | |
| SEQ ID | 106 | HEMO_187_5412 | SWPAVGNCSSALR | 2 | 5412 |
| NO: 106 | | | | | |
| SEQ ID | 107 | IC1_48_1102 | VATTVISK | 1 | 1102 |
| NO: 107 | | | | | |
| SEQ ID | 108 | HPT_184_6513 | MVSHHNLTTGATLIN | 1 | 6513 |
| NO: 108 | | | EQWLLTTAK | | |
| SEQ ID | 109 | APOC3_74_ | FSEFWDLDPEVRPTSA | 1 | N/A |
| NO: 109 | | NONGLYCOSYLATED | VAA | | |
| SEQ ID | 110 | IGM_209_5500 | GLTFQQNASSMCVPD | 2 | 5500 |
| NO: 110 | | | QDTAIR | | |
| SEQ ID | 112 | FETUA_156_5412 | VCQDCPLLAPLNDTR | 1 | 5412 |
| NO: 112 | | | | | |
| SEQ ID | 113 | QUANTPEP.B2M_ | VNHVTLSQPK | 1 | |
| NO: 113 | | VNHVTLSQPK | | | |
| SEQ ID | 114 | IC1_253_5412 | VLSNNSDANLELINT | 3 | 5412 |
| NO: 114 | | | WVAK | | |
| SEQ ID | 115 | CERU_138_5412 | EHEGAIYPDNTTDFQR | 1 | 5412 |
| NO: 115 | | | | | |
| SEQ ID | 116 | IGM_209_5501 | GLTFQQNASSMCVPD | 2 | 5501 |
| NO: 116 | | | QDTAIR | | |
| SEQ ID | 117 | THRB_416MC_5402 | WVLTAAHCLLYPPWD | 3 | 5402 |
| NO: 117 | | | KNFTENDLLVR | | |
| SEQ ID | 118 | TRFE_630_5412 | QQQHLFGSNVTDCSG | 2 | 5412 |
| NO: 118 | | | NFCLFR | | |
| SEQ ID | 119 | FETUA_176_6501 | AALAAFNAQNNGSNF | 2 | 6501 |
| NO: 119 | | | QLEEISR | | |
| SEQ ID | 120 | CO5_741_5412 | ANISHK | 1 | 5412 |
| NO: 120 | | | | | |
| SEQ ID | 121 | FETUA_176_5412 | AALAAFNAQNNGSNF | 2 | 5412 |
| NO: 121 | | | QLEEISR | | |
| SEQ ID | 122 | CFAH_911_5401 | ISEENETTCYMGK | 3 | 5401 |
| NO: 122 | | | | | |
| SEQ ID | 123 | IGG1_297_4511 | EEQYNSTYR | 1 | 4511 |
| NO: 123 | | | | | |
| SEQ ID | 124 | A2MG_247_5200 | IITILEEEMNVSVCGLY | 2 | 5200 |
| NO: 124 | | | TYGKPVPGHVTVSICR | | |
| SEQ ID | 125 | CERU_138_5402 | EHEGAIYPDNTTDFQR | 1 | 5402 |
| NO: 125 | | | | | |
| SEQ ID | 126 | IGA2_205_4510 | TPLTANITK | 1 | 4510 |
| NO: 126 | | | | | |
| SEQ ID | 127 | HRG_125_5402 | VIDFNCTTSSVSSALA | 1 | 5402 |
| NO: 127 | | | NTK | | |
| SEQ ID | 128 | HPT_207_121005 | NLFLNHSENATAK | 2 | 121005 |
| NO: 128 | | | | | |
| SEQ ID | 129 | AACT_106_7604 | FNLTETSEAEIHQSFQ | 1 | 7604 |
| NO: 129 | | | HLLR | | |
| SEQ ID | 130 | CERU_397_6503 | ENLTAPGSDSAVFFEQ | 3 | 6503 |
| NO: 130 | | | GTTR | | |
| SEQ ID | 131 | HPT_207_11904 | NLFLNHSENATAK | 2 | 11904 |
| NO: 131 | | | | | |

TABLE 13
Glycoproteins Associated with Melanoma

| SEQ | Protein | | Uniprot |
|---|---|---|---|
| ID NO. | Abbreviation | Protein Name | ID |
| SEQ ID | A2GL | Leucine-richAlpha- | P02750 |
| NO: 132 | | 2-glycoprotein | |
| SEQ ID | ANGT | P01019\| | P01019 |
| NO: 133 | | Angiotensinogen | |
| SEQ ID | HPT | Haptoglobin | P00738 |
| NO: 134 | | | |
| SEQ ID | HEMO | Hemopexin | P02790 |
| NO: 135 | | | |
| SEQ ID | IC1 | Plasma protease | P05155 |
| NO: 136 | | C1 inhibitor | |
| SEQ ID | HPT | Haptoglobin | P00738 |
| NO: 137 | | | |
| SEQ ID | APOC3 | Apolipoprotein | P02656 |
| NO: 138 | | C-III | |
| SEQ ID | IGM | Immunoglobulin | P01871 |
| NO: 139 | | heavy constant mu | |
| SEQ ID | FETUA | Alpha-2-HS- | P02765 |
| NO: 140 | | glycoprotein | |
| SEQ ID | B2M | Beta-2- | P61769 |
| NO: 141 | | microglobulin | |
| SEQ ID | IC1 | Plasma protease | P05155 |
| NO: 142 | | C1 inhibitor | |
| SEQ ID | CERU | Ceruloplasmin | P00450 |
| NO: 143 | | | |
| SEQ ID | IGM | Immunoglobulin | P01871 |
| NO: 144 | | heavy constant mu | |
| SEQ ID | THRB | Prothrombin | P00734 |
| NO: 145 | | | |
| SEQ ID | TRFE | Serotransferrin | P02787 |
| NO: 146 | | | |
| SEQ ID | FETUA | Alpha-2-HS- | P02765 |
| NO: 147 | | glycoprotein | |
| SEQ ID | CO5 | ComplementC5 | P01031 |
| NO: 148 | | | |
| SEQ ID | FETUA | Alpha-2-HS- | P02765 |
| NO: 149 | | glycoprotein | |
| SEQ ID | CFAH | ComplementFactorH | P08603 |
| NO: 150 | | | |
| SEQ ID | IGG1 | Immunoglobulin | P01857 |
| NO: 151 | | heavy constant | |
| | | gamma 1 | |
| SEQ ID | A2MG | Alpha-2- | P01023 |
| NO: 152 | | macroglobulin | |
| SEQ ID | CERU | Ceruloplasmin | P00450 |
| NO: 153 | | | |
| SEQ ID | IGA2 | Immunoglobulin | P01877 |
| NO: 154 | | heavy constant | |
| | | alpha 2 | |
| SEQ ID | HRG | Histidine-rich | P04196 |
| NO: 155 | | Glycoprotein | |
| SEQ ID | HPT | Haptoglobin | P00738 |
| NO: 156 | | | |
| SEQ ID | AACT | Alpha-1- | P01011 |
| NO: 157 | | antichymotrypsin | |
| SEQ ID | HPT | Haptoglobin | P00738 |
| NO: 158 | | | |

TABLE 14
Glycopeptides Associated with NSCLC

| | | | | Linking | |
|---|---|---|---|---|---|
| | | | | Site Pos. | Glycan |
| SEQ ID | Transition | Peptide Structure | | in Peptide | Structure |
| NO: | Number | (PS) NAME | Peptide Sequence | Sequence | GL NO. |
| SEQ ID | 159 | TRFE_630_6513 | QQQHLFGSNVTDCSG | 9 | 6513 |
| NO: 159 | | | NFCLFR | | |
| SEQ ID | 160 | AGP1_93_6503 | QDQCIYNTTYLNVQR | 7 | 6503 |
| NO: 160 | | | | | |
| SEQ ID | 161 | IGG2_297_5510 | EEQFNSTFR | 5 | 5510 |
| NO: 161 | | | | | |
| SEQ ID | 162 | IGGI_297_5410 | EEQYNSTYR | 5 | 5410 |
| NO: 162 | | | | | |
| SEQ ID | 163 | AACT_271_6502 | YTGNASALFILPDQDK | 4 | 6502 |
| NO: 163 | | | | | |
| SEQ ID | 164 | AGP1_103_6503 | ENGTISR | 2 | 6503 |
| NO: 164 | | | | | |
| SEQ ID | 165 | IGG1_297_3410 | EEQYNSTYR | 5 | 3410 |
| NO: 165 | | | | | |
| SEQ ID | 166 | IGG1_297_5510 | EEQYNSTYR | 5 | 5510 |
| NO: 166 | | | | | |
| SEQ ID | 167 | VTNC_86_6503 | NNATVHEQVGGPSLT | 2 | 6503 |
| NO: 167 | | | SDLQAQSK | | |
| SEQ ID | 168 | HPT_241_6513 | VVLHPNYSQVDIGLIK | 6 | 6513 |
| NO: 168 | | | | | |
| SEQ ID | 169 | CERU_762_6523 | ELHHLQEQNVSNAFL | 9 | 6523 |
| NO: 169 | | | DK | | |
| SEQ ID | 170 | HRG_345_5412 | HSHNNNSSDLHPHK | 6 | 5412 |
| NO: 170 | | | | | |
| SEQ ID | 171 | HPT_207_5401 | NLFLNHSENATAK | 5 | 5401 |
| NO: 171 | | | | | |
| SEQ ID | 172 | AGP1_93_8704 | QDQCIYNTTYLNVQR | 7 | 8704 |
| NO: 172 | | | | | |
| SEQ ID | 173 | HRG_125_5402 | VIDFNCTTSSVSSALA | 5 | 5402 |
| NO: 173 | | | NTK | | |
| SEQ ID | 174 | A1AT_271_5401 | YLGNATAIFFLPDEGK | 4 | 5401 |
| NO: 174 | | | | | |
| SEQ ID | 175 | KNG1_205_5412 | ITYSIVQTNCSK | 9 | 5412 |
| NO: 175 | | | | | |
| SEQ ID | 176 | TRFE_432_5401 | CGLVPVLAENYNK | 12 | 5401 |
| NO: 176 | | | | | |
| SEQ ID | 177 | IGG2_297_5410 | EEQFNSTFR | 5 | 5410 |
| NO: 177 | | | | | |
| SEQ ID | 178 | TRFE_630_5400 | QQQHLFGSNVTDCSG | 9 | 5400 |
| NO: 178 | | | NFCLFR | | |
| SEQ ID | 179 | AGP1_93_7603 | QDQCIYNTTYLNVQR | 7 | 7603 |
| NO: 179 | | | | | |
| SEQ ID | 180 | CERU_762_6512 | ELHHLQEQNVSNAFL | 9 | 6512 |
| NO: 180 | | | DK | | |
| SEQ ID | 181 | A1AT_107_6502 | ADTHDEILEGLNFNLT | 14 | 6502 |
| NO: 181 | | | EIPEAQIHEGFQELLR | | |
| SEQ ID | 182 | KLKB1_494_5400 | LQAPLNYTEFQKPICL | 6 | 5400 |
| NO: 182 | | | PSK | | |
| SEQ ID | 183 | IGC1_297_5411 | EEQYNSTYR | 5 | 5411 |
| NO: 183 | | | | | |
| SEQ ID | 184 | HPT_207_121005 | NLFLNHSENATAK | 5.9 | 121005 |
| NO: 184 | | | | | |
| SEQ ID | 185 | FETUA_176_5412 | AALAAFNAQNNGSNF | 11 | 5412 |
| NO: 185 | | | QLEEISR | | |
| SEQ ID | 186 | HPT_241_5412 | VVLHPNYSQVDIGLIK | 6 | 5412 |
| NO: 186 | | | | | |
| SEQ ID | 187 | CFAH_882_5401 | IPCSQPPQIEHGTINSSR | 15 | 5401 |
| NO: 187 | | | | | |
| SEQ ID | 188 | AGP1_93_6502 | QDQCIYNTTYLNVQR | 7 | 6502 |
| NO: 188 | | | | | |
| SEQ ID | 189 | IC1_352_5412 | VGQLQLSHNLSLVILV | 9 | 5412 |
| NO: 189 | | | PQNLK | | |
| SEQ ID | 190 | HEMO_187_NON- | SWPAVGNCSSALR | 7 | NONGLYCO- |
| NO: 190 | | GLYCOSYLATED | | | SYLATED |
| SEQ ID | 191 | KLKB1_396_5401 | IVGGTNSSWGEWPWQ | 6 | 5401 |
| NO: 191 | | | VSLQVK | | |
| SEQ ID | 192 | IGJ_71_5412 | ENISDPTSPLR | 2 | 5412 |
| NO: 192 | | | | | |
| SEQ ID | 193 | AGP12_72MC_7614 | SVQEIQATFFYFTPNK | 15 | 7614 |
| NO: 193 | | | TEDTIELR | | |
| SEQ ID | 194 | TRFE_630_5401 | QQQHLFGSNVTDCSG | 9 | 5401 |
| NO: 194 | | | NFCLFR | | |
| SEQ ID | 195 | TRFE_630_5411 | QQQHLFGSNVTDCSG | 9 | 5411 |
| NO: 195 | | | NFCLFR | | |
| SEQ ID | 196 | IGM_209_5512 | GLTFQQNASSMCVPD | 7 | 5512 |
| NO: 196 | | | QDTAIR | | |
| SEQ ID | 197 | KNG1_137_NON- | FSVATQTCQITPAEGPVVTAQY | N/A | NONGLYCO- |
| NO: 197 | | GLYCOSYLATED | DCLGCVHPISTQSPDLEPILR | | SYLATED |
| SEQ ID | 198 | FHR1_126_5402 | LQNNENNISCVER | 7 | 5402 |
| NO: 198 | | | | | |
| SEQ ID | 199 | IGG1_297_4500 | EEQYNSTYR | 5 | 4500 |
| NO: 199 | | | | | |
| SEQ ID | 200 | AGP1_93_7612 | QDQCIYNTTYLNVQR | 7 | 7612 |
| NO: 200 | | | | | |
| SEQ ID | 201 | A1AT_271_5402 | YLGNATAIFFLPDEGK | 4 | 5402 |
| NO: 201 | | | | | |
| SEQ ID | 202 | A1AT_271_6503 | YLGNATAIFFLPDEGK | 4 | 6503 |
| NO: 202 | | | | | |
| SEQ ID | 203 | KNG1_294_5412 | LNAENNATFYFK | 6 | 5412 |
| NO: 203 | | | | | |
| SEQ ID | 204 | CO2_621_6200 | QSVPAHFVALNGSK | 11 | 6200 |
| NO: 204 | | | | | |
| SEQ ID | 205 | HRG_271_2202 | SSTTKPPFKPHGSR | 1 | 2202 |
| NO: 205 | | | | | |
| SEQ ID | 206 | APOD_98_5412 | ADGTVNQIEGEATPVN | 16 | 5412 |
| NO: 206 | | | LTEPAK | | |
| SEQ ID | 207 | AEAM_33_5402 | DIENFNSTQK | 6 | 5402 |
| NO: 207 | | | | | |

TABLE 15
Glycoproteins associated with NSCLC

| SEQ ID | Protein | | |
|---|---|---|---|
| NO. | Abbreviation | Protein Name | Uniprot ID |
| SEQ ID | TRFE | Serotransferrin | P02787 |
| NO: 208 | | | |
| SEQ ID | AGP1 | Alpha-1-acid glycoprotein 1 | P02763 |
| NO: 209 | | | |
| SEQ ID | IGG2 | Immunoglobulin heavy constant gamma 2 | P01859 |
| NO: 210 | | | |
| SEQ ID | IGG1 | Immunoglobulin heavy constant gamma 1 | P01857 |
| NO: 211 | | | |
| SEQ ID | AACT | Alpha-1-antichymotrypsin | P01011 |
| NO: 212 | | | |
| SEQ ID | AGP1 | Alpha-1-acid glycoprotein 1 | P02763 |
| NO: 213 | | | |
| SEQ ID | IGG1 | Immunoglobulin heavy constant gamma 1 | P01857 |
| NO: 214 | | | |
| SEQ ID | VTNC | Vitronectin | P04004 |
| NO: 215 | | | |
| SEQ ID | HPT | Haptoglobin | P00738 |
| NO: 216 | | | |
| SEQ ID | CERU | Ceruloplasmin | P00450 |
| NO: 217 | | | |
| SEQ ID | HRG | Histidine-rich Glycoprotein | P04196 |
| NO: 218 | | | |
| SEQ ID | HPT | Haptoglobin | P00738 |
| NO: 219 | | | |
| SEQ ID | AGP1 | Alpha-1-acid glycoprotein 1 | P02763 |
| NO: 220 | | | |
| SEQ ID | HRG | Histidine-rich Glycoprotein | P04196 |
| NO: 221 | | | |
| SEQ ID | A1AT | Alpha-1-antitrypsin | P01009 |
| NO: 222 | | | |
| SEQ ID | KNG1 | Kininogen-1 | P01042 |
| NO: 223 | | | |
| SEQ ID | TRFE | Serotransferrin | P02787 |
| NO: 224 | | | |
| SEQ ID | IGG2 | Immunoglobulin heavy constant gamma 2 | P01859 |
| NO: 225 | | | |
| SEQ ID | TRFE | Serotransferrin | P02787 |
| NO: 226 | | | |
| SEQ ID | AGP1 | Alpha-1-acid glycoprotein 1 | P02763 |
| NO: 227 | | | |
| SEQ ID | CERU | Ceruloplasmin | P00450 |
| NO: 228 | | | |
| SEQ ID | A1AT | Alpha-1-antitrypsin | P01009 |
| NO: 229 | | | |
| SEQ ID | KLKB1 | Plasma Kallikrein | P03952 |
| NO: 230 | | | |
| SEQ ID | IGG1 | Immunoglobulin heavy constant gamma 1 | P01857 |
| NO: 231 | | | |
| SEQ ID | HPT | Haptoglobin | P00738 |
| NO: 232 | | | |
| SEQ ID | FETUA | Alpha-2-HS-glycoprotein | P02765 |
| NO: 233 | | | |
| SEQ ID | HPT | Haptoglobin | P00738 |
| NO: 234 | | | |
| SEQ ID | CFAH | Complement Factor H | P08603 |
| NO: 235 | | | |
| SEQ ID | AGP1 | Alpha-1-acid glycoprotein 1 | P02763 |
| NO: 236 | | | |
| SEQ ID | IC1 | Plasma protease C1 inhibitor | P05155 |
| NO: 237 | | | |
| SEQ ID | HEMO | Hemopexin | P02790 |
| NO: 238 | | | |
| SEQ ID | KLKB1 | Plasma Kallikrein | P03952 |
| NO: 239 | | | |
| SEQ ID | IGJ | Immunoglobulin J chain | P01591 |
| NO: 240 | | | |
| SEQ ID | AGP1 & 2 | Alpha-1-acid glycoprotein 1 & 2 | P02763 & |
| NO: 241 | | | P19652 |
| SEQ ID | TRFE | Serotransferrin | P02787 |
| NO: 242 | | | |
| SEQ ID | IGM | Immunoglobulin heavy constant mu | P01871 |
| NO: 243 | | | |
| SEQ ID | KNG1 | Kininogen-1 | P01042 |
| NO: 244 | | | |
| SEQ ID | FHR1 | Complement factor H-related protein 1 | Q03591 |
| NO: 245 | | | |
| SEQ ID | IGG1 | Immunoglobulin heavy constant gamma 1 | P01857 |
| NO: 246 | | | |
| SEQ ID | AGP1 | Alpha-1-acid glycoprotein 1 | P02763 |
| NO: 247 | | | |
| SEQ ID | A1AT | Alpha-1-antitrypsin\|A1AT | P01009 |
| NO: 248 | | | |
| SEQ ID | KNG1 | Kininogen-1\|KNG1 | P01042 |
| NO: 249 | | | |
| SEQ ID | CO2 | ComplementC2 | P06681 |
| NO: 250 | | | |
| SEQ ID | HRG | Histidine-rich Glycoprotein | P04196 |
| NO: 251 | | | |
| SEQ ID | APOD | Apolipoprotein D | P05090 |
| NO: 252 | | | |
| SEQ ID | AFAM | Afamin | P43652 |
| NO: 253 | | | |

TABLE 16
Glycopeptides

| | | | | | Linking | |
|---|---|---|---|---|---|---|
| Peptide | | | | | Site | Glycan |
| SEQ | | Protein | Protein | | Pos. in | Structure |
| ID | Peptide Structure | Abbre- | SEQ | | Protein | GL |
| NO: | (PS) Name | viation | ID | Peptide Sequence | Sequence | NO. |
| 300 | A1AT_70_5412 | A1AT | 430 | QLAHQSNSTNIFFSPVSI | 70 | 5412 |
| | | | | ATAFAMLSLGTK | | |
| 301 | AFAM_33_5402 | AFAM | 465 | DIENFNSTQK | 33 | 5402 |
| 302 | AGP1_93_6502 | AGP1 | 449 | QDQCIYNTTYLNVQR | 93 | 6502 |
| 303 | AGP12_72MC_7614 | AGP1 | 449 | SVQEIQATFFYFTPNKT | 72 | 7614 |
| | | AGP2 | 470 | EDTIFLR | | |
| 304 | CFAH_911_5401 | CFAH | 461 | ISEENETTCYMGK | 911 | 5401 |
| 305 | HPT_207_10803 | HPT | 436 | NLFLNHSENATAK | 207 | 10803 |
| 306 | HPT_207_5401 | HPT | 436 | NLFLNHSENATAK | 207 | 5401 |
| 307 | HPT_241_5412 | HPT | 436 | VVLHPNYSQVDIGLIK | 241 | 5412 |
| 308 | IGG1_297_5400 | IGG1 | 443 | EEQYNSTYR | 297 | 5400 |
| 309 | TRFE_630_5400 | TRFE | 451 | QQQHLFGSNVTDCSGN | 630 | 5400 |
| | | | | FCLFR | | |
| 310 | AGP1_33_6503 | AGP1 | 449 | QIPLCANLVPVPITNAT | 33 | 6503 |
| | | | | LDQITGK | | |
| 311 | UN13A_1005_7512 | | | ACLNSTYEYIFNNCHEL | 1005 | 7512 |
| | | | | YSR | | |
| 312 | A1AT_107_6502 | A1AT | 430 | ADTHDEILEGLNFNLTE | 107 | 6502 |
| | | | | IPEAQIHEGFQELLR | | |
| 313 | A1AT_271_5401 | A1AT | 430 | YLGNATAIFFLPDEGK | 271 | 5401 |
| 314 | A1AT_271_5402 | A1AT | 430 | YLGNATAIFFLPDEGK | 271 | 5402 |
| 315 | A1AT_271_6503 | A1AT | 430 | YLGNATAIFFLPDEGK | 271 | 6503 |
| 316 | A2MG_247_5200 | A2MG | 439 | IITILEEEMNVSVCGLYT | 247 | 5200 |
| | | | | YGKPVPGHVTVSICR | | |
| 317 | A2MG_869_5200 | A2MG | 439 | SLGNVNFTVSAEALESQ | 869 | 5200 |
| | | | | ELCGTEVPSVPEHGR | | |
| 318 | A2MG_869_6200 | A2MG | 439 | SLGNVNFTVSAEALESQ | 869 | 6200 |
| | | | | ELCGTEVPSVPEHGR | | |
| 319 | AACT_106_7604 | AACT | 437 | FNLTETSEAEIHQSFQH | 106 | 7604 |
| | | | | LLR | | |
| 320 | AACT_127_5401 | AACT | 437 | TLNQSSDELQLSMGNA | 127 | 5401 |
| | | | | MFVK | | |
| 321 | AACT_271_6502 | AACT | 437 | YTGNASALFILPDQDK | 271 | 6502 |
| 322 | AACT_271_7602 | AACT | 437 | YTGNASALFILPDQDK | 271 | 7602 |
| 323 | AACT_271_7603 | AACT | 437 | YTGNASALFILPDQDK | 271 | 7603 |
| 324 | AGP1_103_6503 | AGP1 | 449 | ENGTISR | 103 | 6503 |
| 325 | AGP1_33_6502 | AGP1 | 449 | QIPLCANLVPVPITNAT | 33 | 6502 |
| | | | | LDQITGK | | |
| 326 | AGP1_33_6503 | AGP1 | 449 | QIPLCANLVPVPITNAT | 33 | 6503 |
| | | | | LDQITGK | | |
| 327 | AGP1_93_6503 | AGP1 | 449 | QDQCIYNTTYLNVQR | 93 | 6503 |
| 328 | AGP1_93_7603 | AGP1 | 449 | QDQCIYNTTYLNVQR | 93 | 7603 |
| 329 | AGP1_93_7612 | AGP1 | 449 | QDQCIYNTTYLNVQR | 93 | 7612 |
| 330 | AGP1_93_8704 | AGP1 | 449 | QDQCIYNTTYLNVQR | 93 | 8704 |
| 331 | APOC3_74_NONGLYCOSYLATED | APOC3 | 447 | FSEFWDLDPEVRPTSAV | 74 | NON- |
| | | | | AA | | GLYCOSYLATED |
| 332 | APOD_98_5412 | APOD | 456 | ADGTVNQIEGEATPVN | 98 | 5412 |
| | | | | LTEPAK | | |
| 333 | CERU_138_5402 | CERU | 434 | EHEGAIYPDNTTDFQR | 138 | 5402 |
| 334 | CERU_138_5412 | CERU | 434 | EHEGAIYPDNTTDFQR | 138 | 5412 |
| 335 | CERU_397_6503 | CERU | 434 | ENLTAPGSDSAVFFEQG | 397 | 6503 |
| | | | | TTR | | |
| 336 | CERU_762_6512 | CERU | 434 | ELHHLQEQNVSNAFLD | 762 | 6512 |
| | | | | K | | |
| 337 | CERU_762_6523 | CERU | 434 | ELHHLQEQNVSNAFLD | 762 | 6523 |
| | | | | K | | |
| 338 | CFAH_1029_5401 | CFAH | 461 | MDGASNVTCINSR | 1029 | 5401 |
| 339 | CFAH_1029_5402 | CFAH | 461 | MDGASNVTCINSR | 1029 | 5402 |
| 340 | CFAH_882_5401 | CFAH | 461 | IPCSQPPQIEHGTINSSR | 882 | 5401 |
| 341 | CLUS_374_6501 | CLUS | 462 | LANLTQGEDQYYLR | 374 | 6501 |
| 342 | CO2_621_6200 | CO2 | 459 | QSVPAHFVALNGSK | 621 | 6200 |
| 343 | CO5_741_5412 | COS | 440 | ANISHK | 741 | 5412 |
| 344 | CO8B_243_6610 | CO8B | 460 | EYESYSDFERNVTEK | 243 | 6610 |
| 345 | CO8B_553_5410 | CO8B | 460 | WNCWSNWSSCSGR | 553 | 5410 |
| 346 | FETUA_156_5402 | FETUA | 450 | VCQDCPLLAPLNDTR | 156 | 5402 |
| 347 | FETUA_156_5412 | FETUA | 450 | VCQDCPLLAPLNDTR | 156 | 5412 |
| 348 | FETUA_176_5412 | FETUA | 450 | AALAAFNAQNNGSNFQ | 176 | 5412 |
| | | | | LEEISR | | |
| 349 | FETUA_176_6501 | FETUA | 450 | AALAAFNAQNNGSNFQ | 176 | 6501 |
| | | | | LEEISR | | |
| 350 | FHR1_126_5402 | FHR1 | 467 | LQNNENNISCVER | 126 | 5402 |
| 351 | HEMO_187_5412 | HEMO | 452 | SWPAVGNCSSALR | 187 | 5412 |
| 352 | HEMO_187_NONGLYCOSYLATED | HEMO | 452 | SWPAVGNCSSALR | 187 | NON- |
| | | | | | | GLYCOSYLATED |
| 353 | HEMO_453_5401 | HEMO | 452 | ALPQPQNVTSLLGCTH | 453 | 5401 |
| 354 | HPT_184_5412 | HPT | 436 | MVSHHNLTTGATLINE | 184 | 5412 |
| | | | | QWLLTTAK | | |
| 355 | HPT_184_5511 | HPT | 436 | MVSHHNLTTGATLINE | 184 | 5511 |
| | | | | QWLLTTAK | | |
| 356 | HPT_184_6513 | HPT | 436 | MVSHHNLTTGATLINE | 184 | 6513 |
| | | | | QWLLTTAK | | |
| 357 | HPT_207_11904 | HPT | 436 | NLFLNHSENATAK | 207 | 11904 |
| 358 | HPT_207_121005 | HPT | 436 | NLFLNHSENATAK | 207 | 121005 |
| 359 | HPT_241_5401 | HPT | 436 | VVLHPNYSQVDIGLIK | 241 | 5401 |
| 360 | HPT_241_6513 | HPT | 436 | VVLHPNYSQVDIGLIK | 241 | 6513 |
| 361 | HRG_125_5401 | HRG | 455 | VIDFNCTTSSVSSALAN | 125 | 5401 |
| | | | | TK | | |
| 362 | HRG_125_5402 | HRG | 455 | VIDFNCTTSSVSSALAN | 125 | 5402 |
| | | | | TK | | |
| 363 | HRG_271_2202 | HRG | 455 | SSTTKPPFKPHGSR | 271 | 2202 |
| 364 | HRG_345_5412 | HRG | 455 | HSHNNNSSDLHPHK | 345 | 5412 |
| 365 | IC1_253_5412 | IC1 | 457 | VLSNNSDANLELINTW | 253 | 5412 |
| | | | | VAK | | |
| 366 | IC1_352_5412 | IC1 | 457 | VGQLQLSHNLSLVILVP | 352 | 5412 |
| | | | | QNLK | | |
| 367 | IC1_48_1102 | IC1 | 457 | VATTVISK | 48 | 1102 |
| 368 | IGA12_144_3500 | IGA1 | 6 | LSLHRPALEDLLLGSEA | 144 | 3500 |
| | | IGA2 | 446 | NLTCTLTGLR | | |
| 369 | IGA12_144_4401 | IGA1 | 6 | LSLHRPALEDLLLGSEA | 144 | 4401 |
| | | IGA2 | 446 | NLTCTLTGLR | | |
| 370 | IGA12_144_4500 | IGA1 | 6 | LSLHRPALEDLLLGSEA | 144 | 4500 |
| | | IGA2 | 446 | NLTCTLTGLR | | |
| 371 | IGA12_144_5501 | IGA1 | 6 | LSLHRPALEDLLLGSEA | 144 | 5501 |
| | | IGA2 | 446 | NLTCTLTGLR | | |
| 372 | IGA12_144_5502 | IGA1 | | LSLHRPALEDLLLGSEA | 144 | 5502 |
| | | IGA2 | 446 | NLTCTLTGLR | | |
| 373 | IGA2_205_4510 | IGA2 | 446 | TPLTANITK | 205 | 4510 |
| 374 | IGG1_297_3410 | IGG1 | 443 | EEQYNSTYR | 297 | 3410 |
| 375 | IGG1_297_4400 | IGG1 | 443 | EEQYNSTYR | 297 | 4400 |
| 376 | IGG1_297_4500 | IGG1 | 443 | EEQYNSTYR | 297 | 4500 |
| 377 | IGG1_297_4510 | IGG1 | 443 | EEQYNSTYR | 297 | 4510 |
| 378 | IGG1_297_4511 | IGG1 | 443 | EEQYNSTYR | 297 | 4511 |
| 379 | IGG1_297_5410 | IGG1 | 443 | EEQYNSTYR | 297 | 5410 |
| 380 | IGG1_297_5411 | IGG1 | 443 | EEQYNSTYR | 297 | 5411 |
| 381 | IGG1_297_5510 | IGG1 | 443 | EEQYNSTYR | 297 | 5510 |
| 382 | IGG2_297_4411 | IGG2 | 210 | EEQFNSTFR | 297 | 4411 |
| 383 | IGG2_297_4500 | IGG2 | 210 | EEQFNSTFR | 297 | 4500 |
| 384 | IGG2_297_5410 | IGG2 | 210 | EEQFNSTFR | 297 | 5410 |
| 385 | IGG2_297_5411 | IGG2 | 210 | EEQFNSTFR | 297 | 5411 |
| 386 | IGG2_297_5510 | IGG2 | 210 | EEQFNSTFR | 297 | 5510 |
| 387 | IGG34_297_4410 | IGG3 | 14 | EEQYNSTFR | 297 | 4410 |
| | | IGG4 | 444 | | | |
| 388 | IGG34_297_4411 | IGG3 | 14 | EEQYNSTFR | 297 | 4411 |
| | | IGG4 | 444 | | | |
| 389 | IGL71_5412 | IGJ | 442 | ENISDPTSPLR | 71 | 5412 |
| 390 | IGM_209_5500 | IGM | 445 | GLTFQQNASSMCVPDQ | 209 | 5500 |
| | | | | DTAIR | | |
| 391 | IGM_209_5501 | IGM | 445 | GLTFQQNASSMCVPDQ | 209 | 5501 |
| | | | | DTAIR | | |
| 392 | IGM_209_5510 | IGM | 445 | GLTFQQNASSMCVPDQ | 209 | 5510 |
| | | | | DTAIR | | |
| 393 | IGM_209_5512 | IGM | 445 | GLTFQQNASSMCVPDQ | 209 | 5512 |
| | | | | DTAIR | | |
| 394 | ITIH4_517_5401 | ITIH4 | 468 | LPTQNITFQTESSVAEQ | 517 | 5401 |
| | | | | EAEFQSPK | | |
| 395 | KLKB1_127_5410 | KLKB1 | 453 | GVNFNVSK | 127 | 5410 |
| 396 | KLKB1_396_5401 | KLKB1 | 453 | IVGGTNSSWGEWPWQ | 396 | 5401 |
| | | | | VSLQVK | | |
| 397 | KLKB1_494_5400 | KLKB1 | 453 | LQAPLNYTEFQKPICLP | 494 | 5400 |
| | | | | SK | | |
| 398 | KLKB1_494_5410 | KLKB1 | 453 | LQAPLNYTEFQKPICLP | 494 | 5410 |
| | | | | SK | | |
| 399 | KNG1_137_NONGLYCOSYLATED | KNG1 | 441 | FSVATQTCQITPAEGPV | 137 | NON- |
| | | | | VTAQYDCLGCVHPIST | | GLYCOSYLATED |
| | | | | QSPDLEPILR | | |
| 400 | KNG1_205_5412 | KNG1 | 441 | ITYSIVQTNCSK | 205 | 5412 |
| 401 | KNG1_294_5412 | KNG1 | 441 | LNAENNATFYFK | 294 | 5412 |
| 402 | NEWQUANTPEP- | IGG3 | 14 | TPEVTCVVVDVSHEDP | N/A | N/A |
| | IGG3_TPEVTCVVVD | | | EVQFK | | |
| | VSHEDPEVQFK | | | | | |
| 403 | QUANTPEP.A1AT_A | A1AT | 430 | AVLTIDEK | N/A | N/A |
| | VLTIDEK | | | | | |
| 404 | QUANTPEP.A2GL_D | A2GL | 448 | DLLLPQPDLR | N/A | N/A |
| | LLLPQPDLR | | | | | |
| 405 | QUANTPEP.ANGT_S | ANGT | 438 | SLDFTELDVAAEK | N/A | N/A |
| | LDFTELDVAAEK | | | | | |
| 406 | QUANTPEP.B2M_VN | B2M | 466 | VNHVTLSQPK | N/A | N/A |
| | HVTLSQPK | | | | | |
| 407 | QUANTPEP.IGG4_TT | IGG4 | 444 | TTPPVLDSDGSFFLYSR | N/A | N/A |
| | PPVLDSDGSFFLYSR | | | | | |
| 408 | QUANTPEP.TRFE_D | TFRE | 451 | DDTVCLAK | N/A | N/A |
| | DTVCLAK | | | | | |
| 409 | THBG_36_5402THBG | THBG | 458 | VTACHSSQPNATLYK | 36 | 5402 |
| 410 | THRB_416MC_5402 | THRB | 433 | WVLTAAHCLLYPPWD | 416 | 5402 |
| | | | | KNFTENDLLVR | | |
| 411 | TRFE_432_5401 | TRFE | 451 | CGLVPVLAENYNK | 432 | 5401 |
| 412 | TRFE_630_5401 | TRFE | 451 | QQQHLFGSNVTDCSGN | 630 | 5401 |
| | | | | FCLFR | | |
| 413 | TRFE_630_5411 | TRFE | 451 | QQQHLFGSNVTDCSGN | 630 | 5411 |
| | | | | FCLFR | | |
| 414 | TRFE_630_5412 | TRFE | 451 | QQQHLFGSNVTDCSGN | 630 | 5412 |
| | | | | FCLFR | | |
| 415 | TRFE_630_6513 | TRFE | 451 | QQQHLFGSNVTDCSGN | 630 | 6513 |
| | | | | FCLFR | | |
| 416 | VTNC_169_5401 | VTNC | 454 | NGSLFAFR | 169 | 5401 |
| 417 | VTNC_86_6503 | VTNC | 454 | NNATVHEQVGGPSLTS | 86 | 6503 |
| | | | | DLQAQSK | | |
| 418 | PON1_324_6501 | PON1 | 464 | VTQVYAENGTVLQGST | 324 | 6501 |
| | | | | VASVYK | | |
| 419 | UN13A_1005_5431 | UN13A | 469 | ACLNSTYEYIFNNCHEL | 1005 | 5431 |
| | | | | YSR | | |
| 420 | CAN3_366_6513 | CAN3 | 463 | NPWGQVEWNGSWSDR | 366 | 6513 |
| 421 | UN13A_1005_7420 | UN13A | 469 | ACLNSTYEYIFNNCHEL | 1005 | 7420 |
| | | | | YSR | | |
| 422 | CAN3_366_6503 | CAN3 | 463 | NPWGQVEWNGSWSDR | 366 | 6503 |
| 423 | AACT_106_7604 | AACT | 437 | FNLTETSEAEIHQSFQH | 106 | 7604 |
| | | | | LLR | | |
| 424 | A1AT_107_5411 | A1AT | 430 | ADTHDEILEGLNFNLTE | 107 | 5411 |
| | | | | IPEAQIHEGFQELLR | | |
| 425 | AGP1_33_5402 | AGP1 | 449 | QIPLCANLVPVPITNAT | 33 | 5402 |
| | | | | LDQITGK | | |
| 426 | FETUA_176_7600 | FETUA | 450 | AALAAFNAQNNGSNFQ | 176 | 7600 |
| | | | | LEEISR | | |
| 427 | ITIH4_517_5420.5401 | ITIH5 | 468 | LPTQNITFQTESSVAEQ | 517 | 5420.5401 |
| | | | | EAEFQSPK | | |
| 428 | PON1_324_6502 | PON1 | 464 | VTQVYAENGTVLQGST | 324 | 6502 |
| | | | | VASVYK | | |
| 429 | AGP1_33_6502 | AGP1 | 449 | QIPLCANLVPVPITNAT | 33 | 6502 |
| | | | | LDQITGK | | |

TABLE 17
Glycoproteins

| SEQ | Protein | | Uniprot |
|---|---|---|---|
| ID NO: | Abbreviation | Protein Name | ID |
| 430 | A1AT | Alpha-1-antitrypsin | P01009 |
| 431 | A2MG | Alpha-2-macroglobulin | P01023 |
| 432 | KLKB1 | Plasma Kallikrein | P03952 |
| 433 | THRB | Prothrombin | P00734 |
| 434 | CERU | Ceruloplasmin | P00450 |
| 435 | THRB | Prothrombin | P00734 |
| 436 | HPT | Haptoglobin | P00738 |
| 437 | AACT | Alpha-1-antichymotrypsin | P01011 |
| 438 | ANGT | Angiotensinogen | P01019 |
| 439 | A2MG | Alpha-2-macroglobulin | P01023 |
| 440 | CO5 | ComplementC5 | P01031 |
| 441 | KNG1 | Kininogen-1 | P01042 |
| 442 | IGJ | Immunoglobulin J chain | P01591 |
| 443 | IGG1 | Immunoglobulin heavy constant | P01857 |
| | | gamma 1 | |
| 444 | IGG4 | Immunoglobulin heavy constant | P01861 |
| | | gamma 4 | |
| 445 | IGM | Immunoglobulin heavy constant | P01871 |
| | | mu | |
| 446 | IGA2 | Immunoglobulin heavy constant | P01877 |
| | | alpha 2 | |
| 447 | APOC3 | Apolipoprotein C-III | P02656 |
| 448 | A2GL | Leucine-richAlpha-2-glycoprotein | P02750 |
| 449 | AGP1 | Alpha-1-acid glycoprotein 1 | P02763 |
| 450 | FETUA | Alpha-2-HS-glycoprotein | P02765 |
| 451 | TREE | Serotransferrin | P02787 |
| 452 | HEMO | Hemopexin | P02790 |
| 453 | KLKB1 | Plasma Kallikrein | P03952 |
| 454 | VTNC | Vitronectin | P04004 |
| 455 | HRG | Histidine-rich Glycoprotein | P04196 |
| 456 | APOD | Apolipoprotein D | P05090 |
| 457 | IC1 | Plasma protease C1 inhibitor | P05155 |
| 458 | THBG | Thyroxine-bindingGlobulin | P05543 |
| 459 | CO2 | ComplementC2 | P06681 |
| 460 | CO8B | ComplementComponentC8BChain | P07358 |
| 461 | CFAH | ComplementFactorH | P08603 |
| 462 | CLUS | Clusterin | P10909 |
| 463 | CAN3 | Calpain-3 | P20807 |
| 464 | PON1 | Serum paraoxonase/arylesterase 1 | P27169 |
| 465 | AFAM | Afamin | P43652 |
| 466 | B2M | Beta-2-microglobulin | P61769 |
| 467 | FHR1 | Complement factor H-related | Q03591 |
| | | protein 1 | |
| 468 | ITIH4 | Inter-alpha-trypsin inhibitor heavy | Q14624 |
| | | chain H4 | |
| 469 | UN13A | Protein unc-13HomologA | Q9UPW8 |
| 470 | AGP2 | Alpha-1-acid glycoprotein 2 | P19652 |

TABLE 18
Protein abbreviation, glycosylation site, glycan structure, precursor ion m/z,
and product ion m/z for transitions associated with melanoma

| Transition | | | | Precursor | Product |
|---|---|---|---|---|---|
| Number | Protein | Site | Structure | m/z | m/z |
| 101 | A2GL | N/A | N/A | 590.3 | 725.4 |
| 102 | ANGT | N/A | N/A | 719.4 | 316.2 |
| 103 | A1AT | 70 | 5412 | 1107.7 | 366.1 |
| 104 | HPT | 184 | 5412 | 1258.7 | 366.1 |
| 105 | HPT | 241 | 6513 | 1201.5 | 366.1 |
| 106 | HEMO | 187 | 5412 | 1253.2 | 366.1 |
| 107 | IC1 | 48 | 1102 | 883.4 | 274.1 |
| 108 | HPT | 184 | 6513 | 1138.4 | 366.1 |
| 109 | APOC3 | 74 | NONGLYCOSYLATED | 1069.2 | 1097.59 |
| 110 | IGM | 209 | 5500 | 1042.4 | 366.1 |
| 112 | FETUA | 156 | 5412 | 1031.9 | 204.1 |
| 113 | B2M | N/A | N/A | 561.8 | 244.2 |
| 114 | IC1 | 253 | 5412 | 1114.2 | 204.1 |
| 115 | CERU | 138 | 5412 | 1062.2 | 366.1 |
| 116 | IGM | 209 | 5501 | 1115 | 366.1 |
| 117 | THRB | 416 | 5402 | 1076.5 | 274.1 |
| 118 | TRFE | 630 | 5412 | 1217.7 | 366.1 |
| 119 | FETUA | 176 | 6501 | 1161.7 | 366.1 |
| 120 | CO5 | 741 | 5412 | 1007.7 | 366.1 |
| 121 | FETUA | 176 | 5412 | 1180.2 | 366.1 |
| 122 | CFAH | 911 | 5401 | 1159.4 | 366.1 |
| 123 | IGG1 | 297 | 4511 | 1097.8 | 204.1 |
| 124 | A2MG | 247 | 5200 | 1239.1 | 1314.2 |
| 125 | CERU | 138 | 5402 | 1025.7 | 274.1 |
| 126 | IGA2 | 205 | 4510 | 923.5 | 366.1 |
| 127 | HRG | 125 | 5402 | 1056.2 | 366.1 |
| 128 | HPT | 207 | 121005 | 1378.9 | 366.1 |
| 129 | AACT | 106 | 7604 | 1184.9 | 274.1 |
| 130 | CERU | 397 | 6503 | 998.8 | 204.1 |
| 131 | HPT | 207 | 11904 | 1247.7 | 366.1 |

TABLE 19
Retention time, Δ retention time, and collision energy for
transitions associated with melanoma

| Transition | Retention Time | Delta Retention | Collision |
|---|---|---|---|
| Number | (min) | Time | Energy |
| 101 | 30.53 | 1.4 | 15 |
| 102 | 30.46 | 1.2 | 21 |
| 103 | 47.02 | 2 | 27 |
| 104 | 33.49 | 1.4 | 31 |
| 105 | 31.15 | 1.4 | 30 |
| 106 | 21.54 | 1.5 | 30 |
| 107 | 11.64 | 1.4 | 25 |
| 108 | 34.56 | 1.4 | 28 |
| 109 | 38.45 | N/A | N/A |
| 110 | 23.6 | 1.4 | 30 |
| 112 | 27.38 | 1.6 | 30 |
| 113 | 9.46 | 1.2 | 25 |
| 114 | 35.71 | 1.4 | 30 |
| 115 | 16.6 | 1.4 | 25 |
| 116 | 25.38 | 1.4 | 20 |
| 117 | 40.57 | 1.4 | 20 |
| 118 | 32.42 | 1.8 | 30 |
| 119 | 30.11 | 1.4 | 29 |
| 120 | 4.17 | 1.6 | 30 |
| 121 | 30.61 | 1.4 | 29 |
| 122 | 12.23 | 1.4 | 35 |
| 123 | 8.61 | 1.3 | 15 |
| 124 | 38.71 | 1.3 | 25 |
| 125 | 16.83 | 1.4 | 20 |
| 126 | 12.44 | 1.4 | 22 |
| 127 | 28.65 | 1.4 | 25 |
| 128 | 13.48 | 1.5 | 35 |
| 129 | 38.45 | 1.2 | 30 |
| 130 | 27.87 | 1.4 | 40 |
| 131 | 13.45 | 1.5 | 31 |

TABLE 20
Protein abbreviation, glycosylation site, glycan
structure, precursor ion m/z, and product ion m/z
for transitions associated with NSCLC

| Transition | | | | Precursor | Product |
|---|---|---|---|---|---|
| Number | Protein | Site | Structure | m/z | m/z |
| 159 | TRFE | 630 | 6513 | 1105.6 | 366.1 |
| 160 | AGP1 | 93 | 6503 | 1195.3 | 366.1 |
| 161 | IGG2 | 297 | 5510 | 1043.8 | 366.1 |
| 162 | IGG1 | 297 | 5410 | 987.1 | 366.1 |
| 163 | AACT | 271 | 6502 | 1441.6 | 366.1 |
| 164 | AGP1 | 103 | 6503 | 1213.3 | 366.1 |
| 165 | IGG1 | 297 | 3410 | 879 | 204.1 |
| 166 | IGG1 | 297 | 5510 | 1054.7 | 366.1 |
| 167 | VTNC | 86 | 6503 | 1311.8 | 366.1 |
| 168 | HPT | 241 | 6513 | 1201.5 | 366.1 |
| 169 | CERU | 762 | 6523 | 1295 | 274.1 |
| 170 | HRG | 345 | 5412 | 994.4 | 366.1 |
| 171 | HPT | 207 | 5401 | 1124.8 | 366.1 |
| 172 | AGP1 | 93 | 8704 | 967.4 | 366.1 |
| 173 | HRG | 125 | 5402 | 1056.2 | 366.1 |
| 174 | A1AT | 271 | 5401 | 1224.5 | 366.1 |
| 175 | KNG1 | 205 | 5412 | 942.4 | 274.1 |
| 176 | TRFE | 432 | 5401 | 1131.1 | 366.1 |
| 177 | IGG2 | 297 | 5410 | 976.1 | 366.1 |
| 178 | TRFE | 630 | 5400 | 1035.6 | 366.1 |
| 179 | AGP1 | 93 | 7603 | 1286.6 | 366.1 |
| 180 | CERU | 762 | 6512 | 1186 | 366.1 |
| 181 | A1AT | 107 | 6502 | 1253.6 | 366.1 |
| 182 | KLKB1 | 494 | 5400 | 968.2 | 366.1 |
| 183 | IGG1 | 297 | 5411 | 1084.1 | 366.1 |
| 184 | HPT | 207 | 121005 | 1378.9 | 366.1 |
| 185 | FETUA | 176 | 5412 | 1180.2 | 366.1 |
| 186 | HPT | 241 | 5412 | 1383 | 366.1 |
| 187 | CFAH | 882 | 5401 | 984.7 | 366.1 |
| 188 | AGP1 | 93 | 6502 | 1122.5 | 366.1 |
| 189 | IC1 | 352 | 5412 | 1167.3 | 366.1 |
| 190 | HEMO | 187 | NONGLYCOSYLATED | 703.3 | 566.3 |
| 191 | KLKB1 | 396 | 5401 | 1069.2 | 204.1 |
| 192 | IGJ | 71 | 5412 | 1193.8 | 366.1 |
| 193 | AGP12 | 72 | 7614 | 1313.1 | 366.1 |
| 194 | TRFE | 630 | 5401 | 1108.4 | 366.1 |
| 195 | TRFE | 630 | 5411 | 1144.9 | 366.1 |
| 196 | IGM | 209 | 5512 | 1224.1 | 366.1 |
| 197 | KNG1 | 137 | NONGLYCOSYLATED | 1190.6 | 1349.7 |
| 198 | FHR1 | 126 | 5402 | 1265.5 | 366.1 |
| 199 | IGG1 | 297 | 4500 | 951.7 | 204.1 |
| 200 | AGP1 | 93 | 7612 | 1250.3 | 366.1 |
| 201 | A1AT | 271 | 5402 | 991.2 | 366.1 |
| 202 | A1AT | 271 | 6503 | 1155.5 | 274.1 |
| 203 | KNG1 | 294 | 5412 | 946.9 | 204.1 |
| 204 | CO2 | 621 | 6200 | 945.1 | 829.4 |
| 205 | HRG | 271 | 2202 | 710.8 | 274.1 |
| 206 | APOD | 98 | 5412 | 1152.5 | 274.1 |
| 207 | AFAM | 33 | 5402 | 851.1 | 366.1 |

TABLE 21
Retention time, A retention time, and collision
energy for transitions associated with NSCLC

| | Retention | Delta | |
|---|---|---|---|
| Transition | Time | Retention | Collision |
| Number | (min) | Time | Energy |
| 159 | 33.44 | 1.4 | 27 |
| 160 | 23.77 | 1.4 | 25 |
| 161 | 12.99 | 1.2 | 25 |
| 162 | 7.9 | 1.3 | 24 |
| 163 | 30.91 | 1.4 | 35 |
| 164 | 5.97 | 1.6 | 30 |
| 165 | 8.01 | 1.3 | 21 |
| 166 | 8.09 | 1.3 | 20 |
| 167 | 19.44 | 1.4 | 37 |
| 168 | 31.27 | 1.4 | 30 |
| 169 | 20.77 | 1.4 | 25 |
| 170 | 6.55 | 1.4 | 25 |
| 171 | 14.38 | 1.5 | 30 |
| 172 | 23.81 | 1.4 | 23 |
| 173 | 28.7 | 1.4 | 25 |
| 174 | 37.62 | 1.4 | 30 |
| 175 | 16.93 | 1.4 | 20 |
| 176 | 26.42 | 1.4 | 28 |
| 177 | 12.87 | 1.2 | 20 |
| 178 | 30.62 | 1.4 | 25 |
| 179 | 23.61 | 1.4 | 25 |
| 180 | 19.97 | 1.4 | 36 |
| 181 | 42.79 | 1.6 | 30 |
| 182 | 30.4 | 1.4 | 30 |
| 183 | 8.35 | 1.3 | 27 |
| 184 | 13.41 | 1.5 | 35 |
| 185 | 30.64 | 1.4 | 29 |
| 186 | 30.52 | 1.4 | 35 |
| 187 | 14.9 | 1.6 | 25 |
| 188 | 23.17 | 1.4 | 28 |
| 189 | 39.45 | 1.5 | 30 |
| 190 | 21.83 | 1.4 | 20 |
| 191 | 39.8 | 1.4 | 25 |
| 192 | 16.04 | 1.4 | 25 |
| 193 | 41.23 | 1.4 | 27 |
| 194 | 31.54 | 1.8 | 27 |
| 195 | 30.97 | 1.6 | 30 |
| 196 | 26.21 | 1.4 | 30 |
| 197 | 38.59 | 1 | 30 |
| 198 | 11.55 | 1.5 | 30 |
| 199 | 8.13 | 1.3 | 23 |
| 200 | 22.84 | 1.4 | 31 |
| 201 | 38.43 | 1.4 | 24 |
| 202 | 38.74 | 1.4 | 30 |
| 203 | 22.96 | 1.4 | 20 |
| 204 | 16.26 | 1.4 | 25 |
| 205 | 6.74 | 1.4 | 15 |
| 206 | 24.42 | 1.4 | 30 |
| 207 | 11.62 | 1.2 | 20 |

[0379] In some embodiments, provided herein are methods for diagnosing a melanoma condition (metastatic melanoma) comprising detecting one or more biomarkers. In some embodiments, the one or more biomarkers comprise one or more glycopeptides. In some embodiments, the one or more biomarkers comprises one or more peptide structures set forth in Table 7. In some embodiments, the method comprises detecting one or more glycopeptides comprising a sequence set forth in SEQ ID NOs: 21-46. In some embodiments, the method comprises detecting one or more glycopeptides comprising a sequence set forth in SEQ ID NOs: 21-46. In some embodiments, the method comprises detecting one or more glycopeptides comprising a sequence set forth in SEQ ID NOs: 21-46. In some embodiments, the method comprises detecting one or more glycopeptides comprising a sequence set forth in SEQ ID NOs: 21-46. In some embodiments, the glycopeptide comprises a glycan with the structures in Table 7. In some embodiments, the glycopeptide is a glycopeptide of a glycoprotein provided in Table 8. In some embodiments, the glycopeptide is a glycopeptide provided in Table 16. In some embodiments the glycopeptide comprises a sequence set forth in SEQ ID NO:300-429. In some embodiments, the glycopeptide is a glycopeptide a glycoprotein comprising SEQ ID NO:1-20.

[0380] In some embodiments, the diagnosis is based upon presence and/or amount of at least one, at least two, at least three, at least four, at least five, at least six, at least seven or eight peptide structures from Table 7. In some embodiments, the diagnosis is based upon the presence and/or amount of one or more peptides comprising the amino acid sequence of SEQ ID NOs: 21-46. In some embodiments, the diagnosis is based upon the presence and/or amount of two or more peptides comprising the amino acid sequence of SEQ ID NOs: 21-46. In some embodiments, the diagnosis is based upon the presence and/or amount of three or more peptides comprising the amino acid sequence of SEQ ID NOs: 21-46. In some embodiments, the diagnosis is based upon the presence and/or amount of four or more peptides comprising the amino acid sequence of SEQ ID NOs: 21-46. In some embodiments, the diagnosis is based upon the presence and/or amount of five or more peptides comprising the amino acid sequence of SEQ ID NOs: 21-46. In some embodiments, the diagnosis is based upon the presence and/or amount of six or more peptides comprising the amino acid sequence of SEQ ID NOs: 21-46. In some embodiments, the diagnosis is based upon the presence and/or amount of seven or more peptides comprising the amino acid sequence of SEQ ID NOs: 21-46. In some embodiments, the diagnosis is based upon the presence and/or amount of each of the peptides comprising the amino acid sequence of SEQ ID NOs: 21-46. In some embodiments, the glycopeptide is a glycopeptide of a glycoprotein provided in Table 8. In some embodiments, the glycopeptide is a glycopeptide provided in Table 16. In some embodiments the glycopeptide comprises a sequence set forth in SEQ ID NO:300-429. In some embodiments, the glycopeptide is a glycopeptide a glycoprotein comprising SEQ ID NO:1-20.

[0381] In some embodiments, the diagnosis is based upon the presence and/or amount of one or more peptides consisting of the amino acid sequence of SEQ ID NOs: 21-46. In some embodiments, the diagnosis is based upon the presence and/or amount of two or more peptides consisting of the amino acid sequence of SEQ ID NOs: 21-46. In some embodiments, the diagnosis is based upon the presence and/or amount of three or more peptides consisting of the amino acid sequence of SEQ ID NOs: 21-46. In some embodiments, the diagnosis is based upon the presence and/or amount of four or more peptides consisting of the amino acid sequence of SEQ ID NOs: 21-46. In some embodiments, the diagnosis is based upon the presence and/or amount of five or more peptides consisting of the amino acid sequence of SEQ ID NOs: 21-46. In some embodiments, the diagnosis is based upon the presence and/or amount of six or more peptides consisting of the amino acid sequence of SEQ ID NOs: 21-46. In some embodiments, the diagnosis is based upon the presence and/or amount of seven or more peptides consisting of the amino acid sequence of SEQ ID NOs: 21-46. In some embodiments, the diagnosis is based upon the presence and/or amount of each of the peptides consisting of the amino acid sequence of SEQ ID NOs: 21-46. In some embodiments, the glycopeptide is a glycopeptide of a glycoprotein provided in Table 8. In some embodiments, the glycopeptide is a glycopeptide provided in Table 16. In some embodiments the glycopeptide comprises a sequence set forth in SEQ ID NO:300-429. In some embodiments, the glycopeptide is a glycopeptide a glycoprotein comprising SEQ ID NO:1-20.

[0382] In some embodiments, the diagnosis is based upon the presence and/or amount of one or more peptides comprising the amino acid sequence of SEQ ID NOs: 21-46. In some embodiments, the diagnosis is based upon the presence and/or amount of two or more peptides comprising the amino acid sequence of SEQ ID NOs: 21-46. In some embodiments, the diagnosis is based upon the presence and/or amount of three or more peptides comprising the amino acid sequence of SEQ ID NOs: 21-46. In some embodiments, the diagnosis is based upon the presence and/or amount of four or more peptides comprising the amino acid sequence of SEQ ID NOs: 21-46. In some embodiments, the diagnosis is based upon the presence and/or amount of five or more peptides comprising the amino acid sequence of SEQ ID NOs: 21-46. In some embodiments, the diagnosis is based upon the presence and/or amount of six or more peptides comprising the amino acid sequence of SEQ ID NOs: 21-46. In some embodiments, the diagnosis is based upon the presence and/or amount of seven or more peptides comprising the amino acid sequence of SEQ ID NOs: 21-46. In some embodiments, the diagnosis is based upon the presence and/or amount of each of the peptides comprising the amino acid sequence of SEQ ID NOs: 21-46. In some embodiments, the glycopeptide is a glycopeptide of a glycoprotein provided in Table 8. In some embodiments, the glycopeptide is a glycopeptide provided in Table 16. In some embodiments the glycopeptide comprises a sequence set forth in SEQ ID NO:300-429. In some embodiments, the glycopeptide is a glycopeptide a glycoprotein comprising SEQ ID NO:1-20.

[0383] In some embodiments, the diagnosis is based upon the presence and/or amount of one or more peptides consisting of the amino acid sequence of SEQ ID NOs: 21-46. In some embodiments, the diagnosis is based upon the presence and/or amount of two or more peptides consisting of the amino acid sequence of SEQ ID NOs: 21-46. In some embodiments, the diagnosis is based upon the presence and/or amount of three or more peptides consisting of the amino acid sequence of SEQ ID NOs: 21-46. In some embodiments, the diagnosis is based upon the presence and/or amount of four or more peptides consisting of the amino acid sequence of SEQ ID NOs: 21-46. In some embodiments, the diagnosis is based upon the presence and/or amount of five or more peptides consisting of the amino acid sequence of SEQ ID NOs: 21-46. In some embodiments, the diagnosis is based upon the presence and/or amount of six or more peptides consisting of the amino acid sequence of SEQ ID NOs: 21-46. In some embodiments, the diagnosis is based upon the presence and/or amount of seven or more peptides consisting of the amino acid sequence of SEQ ID NOs: 21-46. In some embodiments, the diagnosis is based upon the presence and/or amount of each of the peptides consisting of the amino acid sequence of SEQ ID NOs: 21-46. In some embodiments, the glycopeptide is a glycopeptide of a glycoprotein provided in Table 8. In some embodiments, the glycopeptide is a glycopeptide provided in Table 16. In some embodiments the glycopeptide comprises a sequence set forth in SEQ ID NO:300-429. In some embodiments, the glycopeptide is a glycopeptide a glycoprotein comprising SEQ ID NO:1-20.

[0384] In some embodiments, provided herein is a method of treating a melanoma condition (metastatic melanoma) in an individual based upon the presence, absence, or amount of one or more peptide structures set forth in Table 7. In some embodiments, one or more peptide structures set forth in SEQ ID NOs: 21-46 is detected. In some embodiments, the method further comprises delivering a therapeutic agent based upon the presence, absence, or amount of one or more peptide structures set forth in Table 7. In some embodiments, the method comprises selecting a therapeutic agent based upon the presence, absence, or amount of one or more peptide structures set forth in Table 7. In some embodiments, the therapeutic agent is a chemotherapeutic agent and/or a hormone therapy.

[0385] In some embodiments, provided herein are methods for diagnosing a melanoma condition (metastatic melanoma) comprising detecting one or more biomarkers. In some embodiments, the one or more biomarkers comprise one or more glycopeptides. In some embodiments, the one or more biomarkers comprises one or more peptide structures set forth in Table 12. In some embodiments, the method comprises detecting one or more glycopeptides comprising a sequence set forth in SEQ ID NOs: 101-131. In some embodiments, the method comprises detecting one or more glycopeptides comprising a sequence set forth in SEQ ID NOs: 101-131. In some embodiments, the method comprises detecting one or more glycopeptides comprising a sequence set forth in SEQ ID NOs: 101-131. In some embodiments, the method comprises detecting one or more glycopeptides comprising a sequence set forth in SEQ ID NOs: 101-131. In some embodiments, the glycopeptide comprises a glycan with the structures in Table 12. In some embodiments the glycopeptide is a glycopeptide of a glycoprotein provided in Table 13. In some embodiments, the glycopeptide is a glycopeptide of a glycoprotein provided in SEQ ID NO: 132-158.

[0386] In some embodiments, the diagnosis is based upon presence and/or amount of at least one, at least two, at least three, at least four, at least five, at least six, at least seven or eight peptide structures from Table 12. In some embodiments, the diagnosis is based upon the presence and/or amount of one or more peptides comprising the amino acid sequence of SEQ ID NOs: 101-131. In some embodiments, the diagnosis is based upon the presence and/or amount of two or more peptides comprising the amino acid sequence of SEQ ID NOs: 101-131. In some embodiments, the diagnosis is based upon the presence and/or amount of three or more peptides comprising the amino acid sequence of SEQ ID NOs: 101-131. In some embodiments, the diagnosis is based upon the presence and/or amount of four or more peptides comprising the amino acid sequence of SEQ ID NOs: 101-131. In some embodiments, the diagnosis is based upon the presence and/or amount of five or more peptides comprising the amino acid sequence of SEQ ID NOs: 101-131. In some embodiments, the diagnosis is based upon the presence and/or amount of six or more peptides comprising the amino acid sequence of SEQ ID NOs: 101-131. In some embodiments, the diagnosis is based upon the presence and/or amount of seven or more peptides comprising the amino acid sequence of SEQ ID NOs: 101-131. In some embodiments, the diagnosis is based upon the presence and/or amount of each of the peptides comprising the amino acid sequence of SEQ ID NOs: 101-131. In some embodiments the glycopeptide is a glycopeptide of a glycoprotein provided in Table 13. In some embodiments, the glycopeptide is a glycopeptide of a glycoprotein provided in SEQ ID NO: 132-158.

[0387] In some embodiments, the diagnosis is based upon the presence and/or amount of one or more peptides consisting of the amino acid sequence of SEQ ID NOs: 101-131. In some embodiments, the diagnosis is based upon the presence and/or amount of two or more peptides consisting of the amino acid sequence of SEQ ID NOs: 101-131. In some embodiments, the diagnosis is based upon the presence and/or amount of three or more peptides consisting of the amino acid sequence of SEQ ID NOs: 101-131. In some embodiments, the diagnosis is based upon the presence and/or amount of four or more peptides consisting of the amino acid sequence of SEQ ID NOs: 101-131. In some embodiments, the diagnosis is based upon the presence and/or amount of five or more peptides consisting of the amino acid sequence of SEQ ID NOs: 101-131. In some embodiments, the diagnosis is based upon the presence and/or amount of six or more peptides consisting of the amino acid sequence of SEQ ID NOs: 101-131. In some embodiments, the diagnosis is based upon the presence and/or amount of seven or more peptides consisting of the amino acid sequence of SEQ ID NOs: 101-131. In some embodiments, the diagnosis is based upon the presence and/or amount of each of the peptides consisting of the amino acid sequence of SEQ ID NOs: 101-131. In some embodiments the glycopeptide is a glycopeptide of a glycoprotein provided in Table 13. In some embodiments, the glycopeptide is a glycopeptide of a glycoprotein provided in SEQ ID NO: 132-158.

[0388] In some embodiments, the diagnosis is based upon the presence and/or amount of one or more peptides comprising the amino acid sequence of SEQ ID NOs: 101-131. In some embodiments, the diagnosis is based upon the presence and/or amount of two or more peptides comprising the amino acid sequence of SEQ ID NOs: 101-131. In some embodiments, the diagnosis is based upon the presence and/or amount of three or more peptides comprising the amino acid sequence of SEQ ID NOs: 101-131. In some embodiments, the diagnosis is based upon the presence and/or amount of four or more peptides comprising the amino acid sequence of SEQ ID NOs: 101-131. In some embodiments, the diagnosis is based upon the presence and/or amount of five or more peptides comprising the amino acid sequence of SEQ ID NOs: 101-131. In some embodiments, the diagnosis is based upon the presence and/or amount of six or more peptides comprising the amino acid sequence of SEQ ID NOs: 101-131. In some embodiments, the diagnosis is based upon the presence and/or amount of seven or more peptides comprising the amino acid sequence of SEQ ID NOs: 101-131. In some embodiments, the diagnosis is based upon the presence and/or amount of each of the peptides comprising the amino acid sequence of SEQ ID NOs: 101-131. In some embodiments the glycopeptide is a glycopeptide of a glycoprotein provided in Table 13. In some embodiments, the glycopeptide is a glycopeptide of a glycoprotein provided in SEQ ID NO: 132-158.

[0389] In some embodiments, the diagnosis is based upon the presence and/or amount of one or more peptides consisting of the amino acid sequence of SEQ ID NOs: 101-131. In some embodiments, the diagnosis is based upon the presence and/or amount of two or more peptides consisting of the amino acid sequence of SEQ ID NOs: 101-131. In some embodiments, the diagnosis is based upon the presence and/or amount of three or more peptides consisting of the amino acid sequence of SEQ ID NOs: 101-131. In some embodiments, the diagnosis is based upon the presence and/or amount of four or more peptides consisting of the amino acid sequence of SEQ ID NOs: 101-131. In some embodiments, the diagnosis is based upon the presence and/or amount of five or more peptides consisting of the amino acid sequence of SEQ ID NOs: 101-131. In some embodiments, the diagnosis is based upon the presence and/or amount of six or more peptides consisting of the amino acid sequence of SEQ ID NOs: 101-131. In some embodiments, the diagnosis is based upon the presence and/or amount of seven or more peptides consisting of the amino acid sequence of SEQ ID NOs: 101-131. In some embodiments, the diagnosis is based upon the presence and/or amount of each of the peptides consisting of the amino acid sequence of SEQ ID NOs: 101-131. In some embodiments the glycopeptide is a glycopeptide of a glycoprotein provided in Table 13. In some embodiments, the glycopeptide is a glycopeptide of a glycoprotein provided in SEQ ID NO: 132-158.

[0390] In some embodiments, provided herein is a method of treating a melanoma condition (metastatic melanoma) in an individual based upon the presence, absence, or amount of one or more peptide structures set forth in Table 12. In some embodiments, one or more peptide structures set forth in SEQ ID NOs: 101-131 is detected. In some embodiments, the method further comprises delivering a therapeutic agent based upon the presence, absence, or amount of one or more peptide structures set forth in Table 12. In some embodiments, the method comprises selecting a therapeutic agent based upon the presence, absence, or amount of one or more peptide structures set forth in Table 12. In some embodiments, the therapeutic agent is a chemotherapeutic agent and/or a hormone therapy. In some embodiments the glycopeptide is a glycopeptide of a glycoprotein provided in Table 13. In some embodiments, the glycopeptide is a glycopeptide of a glycoprotein provided in SEQ ID NO: 132-158.

[0391] In some embodiments, provided herein are methods for diagnosing non-small-cell lung cancer (NSCLC) comprising detecting one or more biomarkers. In some embodiments, the one or more biomarkers comprise one or more glycopeptides. In some embodiments, the one or more biomarkers comprises one or more peptide structures set forth in Table 14. In some embodiments, the method comprises detecting one or more glycopeptides comprising a sequence set forth in SEQ ID NOs: 159-207. In some embodiments, the method comprises detecting one or more glycopeptides comprising a sequence set forth in SEQ ID NOs: 159-207. In some embodiments, the method comprises detecting one or more glycopeptides comprising a sequence set forth in SEQ ID NOs: 159-207. In some embodiments, the method comprises detecting one or more glycopeptides comprising a sequence set forth in SEQ ID NOs: 159-207. In some embodiments, the glycopeptide comprises a glycan with the structures in Table 14. In some embodiments, the glycopeptide is a glycopeptide of a glycoprotein provided in Table 15. In some embodiments, the glycopeptide is a glycopeptide of a glycoprotein comprising a sequence set forth in SEQ ID NO: 208-253.

[0392] In some embodiments, the diagnosis is based upon presence and/or amount of at least one, at least two, at least three, at least four, at least five, at least six, at least seven or eight peptide structures from Table 14. In some embodiments, the diagnosis is based upon the presence and/or amount of one or more peptides comprising the amino acid sequence of SEQ ID NOs: 159-207. In some embodiments, the diagnosis is based upon the presence and/or amount of two or more peptides comprising the amino acid sequence of SEQ ID NOs: 159-207. In some embodiments, the diagnosis is based upon the presence and/or amount of three or more peptides comprising the amino acid sequence of SEQ ID NOs: 159-207. In some embodiments, the diagnosis is based upon the presence and/or amount of four or more peptides comprising the amino acid sequence of SEQ ID NOs: 159-207. In some embodiments, the diagnosis is based upon the presence and/or amount of five or more peptides comprising the amino acid sequence of SEQ ID NOs: 159-207. In some embodiments, the diagnosis is based upon the presence and/or amount of six or more peptides comprising the amino acid sequence of SEQ ID NOs: 159-207. In some embodiments, the diagnosis is based upon the presence and/or amount of seven or more peptides comprising the amino acid sequence of SEQ ID NOs: 159-207. In some embodiments, the diagnosis is based upon the presence and/or amount of each of the peptides comprising the amino acid sequence of SEQ ID NOs: 159-207. In some embodiments, the glycopeptide is a glycopeptide of a glycoprotein provided in Table 15. In some embodiments, the glycopeptide is a glycopeptide of a glycoprotein comprising a sequence set forth in SEQ ID NO: 208-253.

[0393] In some embodiments, the diagnosis is based upon the presence and/or amount of one or more peptides consisting of the amino acid sequence of SEQ ID NOs: 159-207. In some embodiments, the diagnosis is based upon the presence and/or amount of two or more peptides consisting of the amino acid sequence of SEQ ID NOs: 159-207. In some embodiments, the diagnosis is based upon the presence and/or amount of three or more peptides consisting of the amino acid sequence of SEQ ID NOs: 159-207. In some embodiments, the diagnosis is based upon the presence and/or amount of four or more peptides consisting of the amino acid sequence of SEQ ID NOs: 21-46. In some embodiments, the diagnosis is based upon the presence and/or amount of five or more peptides consisting of the amino acid sequence of SEQ ID NOs: 159-207. In some embodiments, the diagnosis is based upon the presence and/or amount of six or more peptides consisting of the amino acid sequence of SEQ ID NOs: 159-207. In some embodiments, the diagnosis is based upon the presence and/or amount of seven or more peptides consisting of the amino acid sequence of SEQ ID NOs: 159-207. In some embodiments, the diagnosis is based upon the presence and/or amount of each of the peptides consisting of the amino acid sequence of SEQ ID NOs: 159-207. In some embodiments, the glycopeptide is a glycopeptide of a glycoprotein provided in Table 15. In some embodiments, the glycopeptide is a glycopeptide of a glycoprotein comprising a sequence set forth in SEQ ID NO: 208-253.

[0394] In some embodiments, the diagnosis is based upon the presence and/or amount of one or more peptides comprising the amino acid sequence of SEQ ID NOs: 159-207. In some embodiments, the diagnosis is based upon the presence and/or amount of two or more peptides comprising the amino acid sequence of SEQ ID NOs: 159-207. In some embodiments, the diagnosis is based upon the presence and/or amount of three or more peptides comprising the amino acid sequence of SEQ ID NOs: 159-207. In some embodiments, the diagnosis is based upon the presence and/or amount of four or more peptides comprising the amino acid sequence of SEQ ID NOs: 159-207. In some embodiments, the diagnosis is based upon the presence and/or amount of five or more peptides comprising the amino acid sequence of SEQ ID NOs: 159-207. In some embodiments, the diagnosis is based upon the presence and/or amount of six or more peptides comprising the amino acid sequence of SEQ ID NOs: 159-207. In some embodiments, the diagnosis is based upon the presence and/or amount of seven or more peptides comprising the amino acid sequence of SEQ ID NOs: 159-207. In some embodiments, the diagnosis is based upon the presence and/or amount of each of the peptides comprising the amino acid sequence of SEQ ID NOs: 159-207. In some embodiments, the glycopeptide is a glycopeptide of a glycoprotein provided in Table 15. In some embodiments, the glycopeptide is a glycopeptide of a glycoprotein comprising a sequence set forth in SEQ ID NO: 208-253.

[0395] In some embodiments, the diagnosis is based upon the presence and/or amount of one or more peptides consisting of the amino acid sequence of SEQ ID NOs: 159-207. In some embodiments, the diagnosis is based upon the presence and/or amount of two or more peptides consisting of the amino acid sequence of SEQ ID NOs: 159-207. In some embodiments, the diagnosis is based upon the presence and/or amount of three or more peptides consisting of the amino acid sequence of SEQ ID NOs: 159-207. In some embodiments, the diagnosis is based upon the presence and/or amount of four or more peptides consisting of the amino acid sequence of SEQ ID NOs: 159-207. In some embodiments, the diagnosis is based upon the presence and/or amount of five or more peptides consisting of the amino acid sequence of SEQ ID NOs: 159-207. In some embodiments, the diagnosis is based upon the presence and/or amount of six or more peptides consisting of the amino acid sequence of SEQ ID NOs: 159-207. In some embodiments, the diagnosis is based upon the presence and/or amount of seven or more peptides consisting of the amino acid sequence of SEQ ID NOs: 159-207. In some embodiments, the diagnosis is based upon the presence and/or amount of each of the peptides consisting of the amino acid sequence of SEQ ID NOs: 159-207. In some embodiments, the glycopeptide is a glycopeptide of a glycoprotein provided in Table 15. In some embodiments, the glycopeptide is a glycopeptide of a glycoprotein comprising a sequence set forth in SEQ ID NO: 208-253.

[0396] In some embodiments, provided herein is a method of treating non-small-cell lung cancer (NSCLC) in an individual based upon the presence, absence, or amount of one or more peptide structures set forth in Table 14. In some embodiments, one or more peptide structures set forth in SEQ ID NOs: 159-207 is detected. In some embodiments, the method further comprises delivering a therapeutic agent based upon the presence, absence, or amount of one or more peptide structures set forth in Table 14. In some embodiments, the method comprises selecting a therapeutic agent based upon the presence, absence, or amount of one or more peptide structures set forth in Table 14. In some embodiments, the therapeutic agent is a chemotherapeutic agent and/or a hormone therapy. In some embodiments, the glycopeptide is a glycopeptide of a glycoprotein provided in Table 15. In some embodiments, the glycopeptide is a glycopeptide of a glycoprotein comprising a sequence set forth in SEQ ID NO: 208-253.

[0397] In the descriptions herein, it is understood that every description, variation, embodiment or aspect of a biomarker, peptide, glycopeptide, glycoprotein may be combined with every description, variation, embodiment or aspect of other biomarkers, peptides, glycopeptide, glycoproteins the same as if each and every combination of descriptions is specifically and individually listed.

### V. Examples

[0398] The following examples are included for illustrative purposes only and are not intended to limit the scope of the invention.

### Example 1: Glycoproteomics as Liquid Biopsy-Based Predictor of Checkpoint-Inhibitor Treatment Response in Patients with Metastatic Malignant Melanoma

[0399] Protein glycosylation is one of the most abundant and most complex form of post-translational protein modification. Glycosylation affects protein structure, conformation, and function. The elucidation of the potential role of differential protein glycosylation as biomarkers has so far been limited by the technical complexity of generating and interpreting this information. A novel, powerful platform has been recently established that combines ultra-high-performance liquid chromatography coupled to triple quadrupole mass spectrometry with a proprietary machine-learning and neural-network-based data processing engine that allows for high-throughput, highly scalable interrogation of the glycoproteome. This study assessed whether glycoproteomic biomarkers and signatures can predict which patients with metastatic malignant melanoma would respond to PD1/PDL1 checkpoint inhibitors.

[0400] Methods: this platform we interrogated 413 individual glycopeptide (GP) signatures derived from 69 abundant serum proteins in pretreatment blood samples from a cohort of 36 individuals (11 females, 25 males, age range 28 to 90 years) with metastatic malignant melanoma treated either with nivolumab plus ipilimumab (12 patients) or pembrolizumab (24 patients). Plasma samples were taken prior to beginning treatment, stored at −80 C, and run through InterVenn's targeted MRM panel.

[0401] The individual glycopeptide expression levels were associated with time from treatment initiation to progression/metastasis (progression-free survival, PFS) or death (overall survival, OS) in the patient cohorts.

[0402] In addition to assessing individual biomarker associations, multivariable models were built to predict PFS (Melanoma). The multivariate models were built by selecting a small subset of glycopeptides for modeling, proceeding to build a model with n−1 patients, predicting a survival score on the one holdout patient, and iterating over all patients as individual holdouts, to generate unbiased prediction scores for everyone (a leave-one-out cross-validation approach, LOOCV). The resulting scores were dichotomized at a cutoff which optimizes Harrell's C-index, and Kaplan-Meier (KM) curves were plotted.

[0403] Specifically, progression-free survival (PFS) data with follow-up of up to 3.7 years (median: 0.8 years) were used as clinical endpoint phenotype against which the predictive power of differential abundance of GPs was assessed. PFS data were analyzed using Cox Proportional Hazards models. Kaplan Meier curves were generated for GP markers that showed statistically significant differential abundances using a false discovery rate (FDR)-adjusted p-value of ≤0.1 as a cutoff. Hazard Ratio (HR) for PFS was calculated from a Cox Proportional Hazards model, representing the multiplicative increase in odds of progression for each increase of the biomarker by 1 unit. The p-value associated with the HR was analyzed, where p<0.01 was considered significant. The interaction p-value, the p-value associated with the biomarker x treatment interaction, was also analyzed, where significance indicates potential for use in treatment selection.

[0404] Further, as part of this example, an interrogation of 526 glycopeptide (GP) signatures derived from 75 serum proteins in pretreatment blood samples from a cohort of 205 individuals (66 females, 139 males, age range 24 to 97 years) with metastatic malignant melanoma treated either with nivolumab (N) with or without ipilimumab (I, 95 patients) or pembrolizumab (P, 110 patients) immune-checkpoint inhibitor (ICI) therapy.

[0405] In certain embodiments, FIGS. 14A, 14B illustrate the KM curves for a multivariable model, including the training phases and validation phases, respectively. Hazard ratios and p-values on the plots are representative of the high/low split at the risk score cut-off determined by optimizing for sensitivity for non-response. Study 1 KM curve of FIG. 14B labeled “Validation” contains patients from the validation and test data sets. In one example, the optimal model includes 6 biomarkers and a cutoff was selected in the validation set to optimize for sensitivity to response (e.g., test set 720 day performance: sensitivity=99.5%, specificity=25.6%) metrics/curves shown exclude Indeterminate calls (10% of patient set).

[0406] Results: 27 GPs with abundance differences at FDR p≤0.1 were identified, and among them 8 markers at p≤0.001. Using the latter 8 markers, a multivariable model for PFS was created by generating leave-one-out cross-validation (LOOCV) scores and determining an optimized cutoff value for these scores using Harrel's concordance index. Dichotomizing the LOOCV scores using this cutoff value demonstrated the model to yield a hazard ratio of 9.2 at a p-value of 10⁻⁵ for separating treatment responders and non-responders (70% vs. 0% PFS, respectively, at 18 months based on LOOCV score above/below cutoff), as compared to a hazard ratio of 1.5, p=0.5 for PDL1 expression. FIG. 1 shows a Kaplan-Meier curve of patients with metastatic melanoma treated either with a combination of ipilimumab and nivolumab or pembrolizumab alone, where progression-free survival (PFS) was 61% at 2.7 years in the Low Score group (black) as compared to PFS of 50% at 0.10 years in the High Score group (blue).

[0407] In an optimized assay containing 27 glycopeptides and 20 non-glycosylated peptides, we identified 14 GPs with abundance differences at FDR q≤0.05 with regard to PFS. Using 40% of the cohort as a training set and selecting 12 glycopeptide and non-glycosylated peptide biomarker features of the 47 total by LASSO shrinkage, we created a multivariable-model-based classifier for PFS that yielded a hazard ratio (HR) for prediction of likely ICI benefit of 7.5 at p<0.0001. This classifier was validated in the test set comprised of the held-out 60% of patients, yielding a HR of 4.7 at a similar p-value for separating patients likely benefiting from either single or combination ICI therapy and those likely not benefiting (50% PFS of 18 months vs. 3 months based on classifier score above/below cutoff). This classifier has a sensitivity of >99% to predict likely ICI benefit, while still performing at a specificity of 26%, thus helping to safely reduce ultimately unnecessary and non-beneficial exposure to these agents of one in four who otherwise would unnecessarily be exposed to them.

[0408] Conclusions: Our results indicate that glycoproteomics holds a strong promise as a response predictor to checkpoint inhibitor treatment that appears to significantly outperform other currently pursued biomarker approaches in this context.

### Example 2: Blood-Based Glycoprotein Signatures in Patients with Advanced Non-Small-Cell Lung Carcinoma (NSCLC) Receiving First-Line Immune Checkpoint Blockade

[0409] Background: Immune checkpoint blockade is an integral component of first-line therapy for most patients with advanced non-small cell lung cancer (NSCLC), however individual patient outcomes are highly variable and improved biomarkers are needed. Protein glycosylation is an emerging mechanism of immune evasion in cancer. Blood-based glycopeptide signatures were examined in a cohort of advanced NSCLC patients treated with first-line immune checkpoint blockade. This study assessed whether glycoproteomic biomarkers and signatures can predict which patients with NSCLC would respond to PD1/PDL1 checkpoint inhibitors.

[0410] Methods: In two independent studies, whether glycoproteomic biomarkers and signatures may predict which patients would respond to checkpoint inhibitor therapies was determined. For example, Study 1 included of n=205 patients with metastatic melanoma seen at Massachusetts General Hospital (MGH), treated either with Ipilimumab+Nivolumab (n=95) or Pembrolizumab (n=110). Plasma samples were taken prior to beginning treatment, stored at −80 C, and inputted to a targeted multiple reaction monitoring (MRM) panel. Study 2 included n=125 patients with metastatic non-small-cell lung cancer sourced from Tempus and treated with Pembrolizumab. Serum samples were taken prior to beginning treatment, stored at −80 C, and inputted to the targeted MRM panel. In both Study 1 and Study 2, individual glycopeptide expression levels were associated with time from treatment initiation to progression-free survival (PFS) (e.g., progression/metastasis) or overall survival (OS) in the patient cohorts.

[0411] In addition to assessing individual biomarker associations, multivariable models were built to predict OS (NSCLC) and PFS (Melanoma). The multivariable models were built to predict OS (NSCLC) and PFS (Melanoma) by selecting a small subset of glycopeptides through 5-fold repeated cross-validated LASSO regularization, proceeding to build a model with 40% of patients (allocated via balanced stratification on sex, age quartile, PFS/OS event), tuning hyperparameters in LASSO model in another 30% of patients, and predicting a survival score on the remaining 30% of holdout patients (to generate unbiased prediction scores). The resulting prediction scores were dichotomized at a cutoff which optimizes Harrell's C-index, and Kaplan-Meier (KM) curves were plotted final models for products were optimized for sensitivity for non-response. For example, in certain embodiments, FIGS. 15A and 15B illustrate the KM curves for a multivariable model, including the training phases and validation phases, respectively. Hazard ratios and p-values on the plots are representative of the high/low split at the risk score cut-off determined by optimizing for sensitivity for non-response. Study 2 KM curve of FIG. 15B labeled “Validation” contains patients only from the independent/unseen test set since there was no validation set. In one example, the optimal model includes 6 biomarkers and a cutoff was selected in the validation set to optimize for sensitivity to response (e.g., test set 720 day performance: sensitivity=99.5%, specificity=25.6%) metrics/curves shown exclude Indeterminate calls (10% of patient set).

[0412] Results: 30 GPs with abundance differences using a False Discovery Rate (FDR) threshold of 0.05 were identified. Using the 5 most predictive GP markers, a multivariable model for OS was created by generating leave-one-out cross-validation (LOOCV) scores and determining an optimized cutoff value of −0.83 (range: −2.2-3.4) for these scores using Harrell's concordance index. The median overall survival was 2.8 years for patients (n=14) whose GP classifier value was above the cutoff and 0.8 years for patients (n=32) whose GP classifier value was below the cutoff (HR 7.4, 95% CI 1.7-32.1, p=0.007). The model's performance was not affected by sex, age, or treatment regimen.

[0413] Conclusions: Blood-based glycopeptide signatures may represent novel, non-invasive biomarkers of clinical outcome to first-line immune checkpoint blockade in advanced NSCLC. These findings may be validated in larger cohorts and applied in clinical decision-making.

### V. Additional Considerations

[0414] Any headers and/or subheaders between sections and subsections of this document are included solely for the purpose of improving readability and do not imply that features cannot be combined across sections and subsection. Accordingly, sections and subsections do not describe separate embodiments.

[0415] While the present teachings are described in conjunction with various embodiments, it is not intended that the present teachings be limited to such embodiments. On the contrary, the present teachings encompass various alternatives, modifications, and equivalents, as will be appreciated by those of skill in the art. The present description provides preferred exemplary embodiments, and is not intended to limit the scope, applicability or configuration of the disclosure. Rather, the present description of the preferred exemplary embodiments will provide those skilled in the art with an enabling description for implementing various embodiments.

[0416] It is understood that various changes may be made in the function and arrangement of elements without departing from the spirit and scope as set forth in the appended claims. Thus, such modifications and variations are considered to be within the scope set forth in the appended claims. Further, the terms and expressions which have been employed are used as terms of description and not of limitation, and there is no intention in the use of such terms and expressions of excluding any equivalents of the features shown and described or portions thereof, but it is recognized that various modifications are possible within the scope of the invention claimed.

[0417] In describing the various embodiments, the specification may have presented a method and/or process as a particular sequence of steps. However, to the extent that the method or process does not rely on the particular order of steps set forth herein, the method or process should not be limited to the particular sequence of steps described, and one skilled in the art can readily appreciate that the sequences may be varied and still remain within the spirit and scope of the various embodiments.

[0418] Some embodiments of the present disclosure include a system including one or more data processors. In some embodiments, the system includes a non-transitory computer readable storage medium containing instructions which, when executed on the one or more data processors, cause the one or more data processors to perform part or all of one or more methods and/or part or all of one or more processes disclosed herein. Some embodiments of the present disclosure include a computer-program product tangibly embodied in a non-transitory machine-readable storage medium, including instructions configured to cause one or more data processors to perform part or all of one or more methods and/or part or all of one or more processes disclosed herein.

[0419] Specific details are given in the present description to provide an understanding of the embodiments. However, it is understood that the embodiments may be practiced without these specific details. For example, circuits, systems, networks, processes, and other components may be shown as components in block diagram form in order not to obscure the embodiments in unnecessary detail. In other instances, well-known circuits, processes, algorithms, structures, and techniques may be shown without unnecessary detail in order to avoid obscuring the embodiments.

### Embodiments

[0420] Among the provided embodiments are:

1. A method for managing a treatment for a subject diagnosed with a melanoma condition, the method comprising:
[0421] receiving peptide structure data corresponding to a set of glycoproteins in a biological sample obtained from the subject;
[0422] computing a treatment score using quantification data identified from the peptide structure data for a set of peptide structures, wherein the set of peptide structures includes at least one peptide structure identified from a plurality of peptide structures listed in Table 1;
[0423] generating a treatment output that indicates a predicted response to the treatment for the subject using the treatment score.
   2. The method of Embodiment 1, wherein generating the treatment output comprises:
[0424] generating the predicted response to the treatment based on whether the treatment score is above a selected threshold.
   3. The method of Embodiment 2, wherein the selected threshold is 0.5.
   4. The method of Embodiment 2, wherein the generating the predicted response comprises:
[0425] identifying a first predicted response classification for the subject when the treatment score is above 0.5; and
[0426] identifying a second predicted response classification for the subject when the treatment score is not above 0.5.
   5. The method of Embodiment 4, wherein the first predicted response classification is sustained control and wherein the second predicted response classification is early disruption.
   6. The method of any one of Embodiments 1-5, wherein the treatment is pembrolizumab and wherein the set of peptide structures includes at least one peptide structure identified from a plurality of peptide structures listed in Table 2.
   7. The method of any one of Embodiments 1-6, wherein the treatment comprises a combination of nivolumab and ipilimumab and wherein the set of peptide structures includes at least one peptide structure identified from a plurality of peptide structures listed in Table 3.
   8. The method of any one of Embodiments 1-7, wherein the treatment outcome includes a recommendation to modify a treatment plan for the subject.
   9. The method of Embodiment 8, wherein the recommendation for modifying the treatment plan includes at least one of selecting a different treatment for the subject, altering a dosage for the treatment, or combining the treatment with at least one other treatment.
   10. The method of any one of Embodiments 1-9, wherein computing the treatment score comprises:
[0427] computing a proportion of the set of peptide structures having a selected abundance greater than a reference abundance.
   11. The method of Embodiment 10, wherein the reference abundance for a peptide structure of the set of peptide structures is a median of a plurality of abundances for the peptide structure across a sample population and wherein the selected abundance for a glycopeptide structure of the set of peptide structures is a relative abundance and the selected abundance for an aglycosylated peptide structure of the set of peptide structures is an absolute abundance.
   12. The method of any one of Embodiments 1-11, further comprising:
[0428] identifying the set of peptide structures using sample data and a statistical algorithm that identifies a relative significance for each peptide structure of a collection of peptide structures corresponding to the sample data.
   13. The method of Embodiment 12, wherein the statistical algorithm comprises a Wilcoxon rank-sum test.
   14. The method of Embodiment 12 or Embodiment 13, wherein identifying the set of peptide structures comprises:
[0429] performing a differential abundance analysis using the sample data to compare a first portion of the sample data corresponding to a first response classification for the treatment and a second portion of the sample data corresponding to a second response classification for the treatment to identify a selected N most differentiating peptide structures between the first response classification and the second response classification.
   15. The method of Embodiment 14, wherein the selected N most differentiating peptide structures is 20 peptide structures.
   16. The method of Embodiment 14 or Embodiment 15, wherein:
[0430] the first response classification is sustained control which indicates an absence of disruption events during a sustained period of time after treatment administration;
[0431] the second response classification is early disruption which indicates a presence of at least one disruption event during an initial period of time after treatment; and
[0432] the sustained period of time is longer than the initial period of time.
   17. The method of Embodiment 16, wherein the sustained period of time is 12 months and the initial period of time is 6 months.
   18. The method of any one of Embodiments 1-17, wherein the at least one peptide structure comprises a glycopeptide structure defined by a peptide sequence and a glycan structure linked to the peptide sequence at a linking site of the peptide sequence, as identified in Table 1, with the peptide sequence being one of SEQ ID NOS: 21-46 as defined in Table 7.
   19. The method of any one of Embodiments 1-18, wherein the quantification data for a peptide structure of the set of peptide structures comprises at least one of an adjusted abundance, a relative abundance, an absolute abundance, a normalized abundance, a relative quantity, an adjusted quantity, a normalized quantity, a relative concentration, an adjusted concentration, or a normalized concentration.
   20. The method of any one of Embodiments 1-19, wherein the peptide structure data is generated using multiple reaction monitoring mass spectrometry (MRM-MS).
   21. The method of any one of Embodiments 1-20, further comprising:
[0433] creating a sample from the biological sample; and preparing the sample using reduction, alkylation, and enzymatic digestion to form a prepared sample that includes a set of peptide structures.
   22. The method of Embodiment 21, further comprising:
[0434] generating the peptide structure data from the prepared sample using multiple reaction monitoring mass spectrometry (MRM-MS).
   23. The method of any one of Embodiments 1-22, wherein the treatment output comprises at least one of a design for the treatment or a therapeutic dosage for the treatment.
   24. The method of any one of Embodiments 1-23, further comprising:
[0435] sending the treatment output to a remote system.
   25. The method of any one of Embodiments 1-24, further comprising:
[0436] administering a therapeutic dosage of the treatment based on the predicted response being a predicted response classification that indicates the treatment will be successful.
   26. The method of any one of Embodiments 1-25, further comprising:
[0437] administering a therapeutic dosage of the treatment based on the predicted response being sustained control.
   27. A method for treatment management of a subject diagnosed with a melanoma condition, the method comprising:
[0438] receiving peptide structure data corresponding to a set of peptide structures associated with a set of glycoproteins in a biological sample obtained from the subject;
[0439] computing a plurality of treatment scores using quantification data identified from the peptide structure data for a plurality of subsets of the set of peptide structures, wherein each treatment score of the plurality of treatment scores corresponds to a different treatment of a plurality of treatments; wherein each subset of the plurality of subsets includes at least one peptide structure identified from a plurality of peptide structures listed in Table 1;
[0440] performing a comparison analysis of the plurality of treatment scores; and
[0441] generating a treatment output based on the comparison analysis, wherein the treatment output includes a recommended treatment plan for treating the subject.
   28. The method of Embodiment 27, wherein generating the treatment output comprises:
[0442] identifying a treatment of the plurality of treatments having a highest treatment score as a recommended treatment for treating the subject.
   29. The method of Embodiment 27 or Embodiment 28, wherein the plurality of treatments comprises a first treatment of pembrolizumab and a second treatment that is comprised of nivolumab and ipilimumab.
   30. The method of any one of Embodiments 27-29, wherein performing the comparison analysis comprises:
[0443] determining that a treatment of the plurality of treatments has a treatment score below a selected threshold; and
[0444] excluding the treatment from the comparison analysis.
   31. The method of Embodiment 30, wherein the selected threshold is 0.5.
   32. The method of any one of Embodiments 27-31, wherein the generating the treatment output comprises:
[0445] identifying a predicted response classification for the subject for each treatment of the plurality of treatments using a corresponding treatment score of the plurality of treatment scores.
   33. The method of Embodiment 32, wherein the predicted response classification is sustained control when the corresponding treatment score is above a selected threshold and is early disruption when the corresponding treatment score is not above the selected threshold.
   34. The method of Embodiment 33, wherein the selected threshold is 0.5.
   35. The method of any one of Embodiments 27-34, wherein generating the treatment output comprises:
[0446] identifying a treatment of the plurality of treatments having a highest treatment score;
[0447] determining that the highest treatment score is not above a selected threshold; and
[0448] generating the treatment output with the recommended treatment plan including a recommendation to modify an existing treatment plan for the subject.
   36. The method of Embodiment 35, wherein the recommendation for modifying the existing treatment plan includes at least one of selecting a different treatment for the subject, altering a dosage for a treatment that is part of the existing treatment plan, or combining the treatment with at least one other treatment.
   37. The method of any one of Embodiments 27-36, wherein generating the treatment output comprises:
[0449] identifying a treatment of the plurality of treatments having a highest treatment score as a highest-scored treatment;
[0450] determining that the highest treatment score is above a selected threshold; and
[0451] generating the treatment output with the recommended treatment plan identifying the highest-score treatment as a recommended treatment for treating the subject.
   38. The method of any one of Embodiments 27-37, wherein a first treatment of the plurality of treatments comprises pembrolizumab, wherein a second treatment of the plurality of treatments comprises a combination of nivolumab and ipilimumab, and wherein computing the plurality of treatment scores comprises:
[0452] computing a first treatment score for the first treatment using a first portion of the quantification data identified from the peptide structure data for a first subset of the plurality of subsets of the set of peptide structures, wherein the first subset includes at least one peptide structure identified from a plurality of peptide structures listed in Table 2; and
[0453] computing a second treatment score for the second treatment using a second portion of the quantification data identified from the peptide structure data for a second subset of the plurality of subsets of the set of peptide structures, wherein the second subset includes at least one peptide structure identified from a plurality of peptide structures listed in Table 3.
   39. The method of any one of Embodiments 27-38, wherein computing the plurality of treatment scores comprises:
[0454] computing a proportion of a subset of the plurality of subsets of the set of peptide structures having a selected abundance greater than a reference abundance as a treatment score of the plurality of treatment scores.
   40. The method of Embodiment 39, wherein the reference abundance for a peptide structure of the set of peptide structures is a median of a plurality of abundances for the peptide structure across a sample population and wherein the selected abundance for a glycopeptide structure of the set of peptide structures is a relative abundance and the selected abundance for an aglycosylated peptide structure of the set of peptide structures is an absolute abundance.
   41. The method of any one of Embodiments 27-40, further comprising:
[0455] identifying a subset of the plurality of subsets of the set of peptide structures using sample data and a statistical algorithm that identifies a relative significance for each peptide structure of a collection of peptide structures corresponding to the sample data with respect to a response to a selected treatment of the plurality of treatments.
   42. The method of Embodiment 41, wherein the statistical algorithm comprises a Wilcoxon rank-sum test.
   43. The method of Embodiment 41 or Embodiment 42, wherein identifying the subset comprises:
[0456] performing a differential abundance analysis using the sample data to compare a first portion of the sample data corresponding to a first response classification for the selected treatment and a second portion of the sample data corresponding to a second response classification for the selected treatment to identify a selected N most differentiating peptide structures between the first response classification and the second response classification.
   44. The method of Embodiment 43, wherein the selected N most differentiating peptide structures is 20 peptide structures.
   45. The method of Embodiment 43 or Embodiment 44, wherein:
[0457] the first response classification is sustained control which indicates an absence of disruption events during a sustained period of time after treatment administration;
[0458] the second response classification is early disruption which indicates a presence of at least one disruption event during an initial period of time after treatment; and
[0459] the sustained period of time is longer than the initial period of time.
   46. The method of Embodiment 45, wherein the sustained period of time is 12 months and the initial period of time is 6 months.
   47. The method of any one of Embodiments 27-46, wherein the at least one peptide structure comprises a glycopeptide structure defined by a peptide sequence and a glycan structure linked to the peptide sequence at a linking site of the peptide sequence, as identified in Table 1, with the peptide sequence being one of SEQ ID NOS: 21-46 as defined in Table 7.
   48. The method of any one of Embodiments 27-47, wherein the quantification data for a peptide structure of the set of peptide structures comprises at least one of an adjusted abundance, a relative abundance, an absolute abundance, a normalized abundance, a relative quantity, an adjusted quantity, a normalized quantity, a relative concentration, an adjusted concentration, or a normalized concentration.
   49. The method of claim any one of Embodiments 27-48, wherein the peptide structure data is generated using multiple reaction monitoring mass spectrometry (MRM-MS).
   50. The method of any one of Embodiments 27-49, further comprising:
[0460] creating a sample from the biological sample; and
   [0461] preparing the sample using reduction, alkylation, and enzymatic digestion to form a prepared sample that includes a set of peptide structures.
      51. The method of Embodiment 50, further comprising:
   [0462] generating the peptide structure data from the prepared sample using multiple reaction monitoring mass spectrometry (MRM-MS).
      52. The method of any one of Embodiments 27-51, wherein the recommended treatment plan identifies a recommended treatment and a therapeutic dosage for the recommended treatment.
      53. The method of Embodiment 52, further comprising:
   [0463] administering a therapeutic dosage of the recommended.
      54. The method of any one of Embodiments 27-53, further comprising:
   [0464] sending the treatment output to a remote system.
      55. A method for treatment management of a subject diagnosed with a melanoma condition, the method comprising:
   [0465] receiving peptide structure data corresponding to a set of peptide structures associated with a set of glycoproteins in a biological sample obtained from the subject;
   [0466] computing a first treatment score for a first treatment of pembrolizumab using first quantification data identified from the peptide structure data for a first subset of the set of peptide structures, wherein the first subset includes at least one peptide structure identified from a plurality of peptide structures listed in Table 2;
   [0467] computing a second treatment score for a second treatment comprised of nivolumab and ipilimumab using second quantification data identified from the peptide structure data for a second subset of the set of peptide structures, wherein the second subset includes at least one peptide structure identified from a plurality of peptide structures listed in Table 3;
   [0468] performing a comparison analysis of the first treatment score and the second treatment score; and
   [0469] generating a treatment output based on the comparison analysis, wherein the treatment output identifies one of the first treatment and the second treatment as a recommended treatment for the subject.
      56. The method of Embodiment 55, wherein computing the first treatment score comprises:
   [0470] computing a proportion of the first subset having a selected abundance greater than a reference abundance as the first treatment score.
      57. The method of Embodiment 55 or Embodiment 56, wherein computing the second treatment score comprises:
   [0471] computing a proportion of the second subset having a selected abundance greater than a reference abundance as the second treatment score.
      58. A method for treating a subject diagnosed with a melanoma condition, comprising:
   [0472] receiving peptide structure data corresponding to a set of glycoproteins in a biological sample obtained from the subject;
   [0473] computing a treatment score using quantification data identified from the peptide structure data for a set of peptide structures, wherein the set of peptide structures includes at least one peptide structure identified from a plurality of peptide structures listed in Table 1;
   [0474] generating a treatment output that indicates a predicted response to a treatment for the subject using the treatment score; and
   [0475] administering the treatment to the patient in response to the predicted response includes a positive response classification, the step of administering comprising at least one of intravenous or oral administration of the recommended treatment or a derivative thereof at a therapeutic dosage,
      [0476] wherein the treatment is selected as one from a group consisting of:
         [0477] a first treatment of pembrolizumab for which the therapeutic dosage of at least one of 200 mg every three weeks, 2 mg/kg every three weeks is administered, or 400 mg every 6 weeks; and
         [0478] a second treatment comprised of nivolumab and ipilimumab for which the therapeutic dosage of either 1 mg/kg nivolumab with 3 mg/kg ipilimumab or 3 mg/kg nivolumab with 1 mg/kg ipilimumab is administered.
            59. A method for treating a subject diagnosed with a melanoma condition, comprising:
   [0479] receiving peptide structure data corresponding to a set of peptide structures associated with a set of glycoproteins in a biological sample obtained from the subject;
   [0480] computing a plurality of treatment scores using quantification data identified from the peptide structure data for a plurality of subsets of the set of peptide structures, wherein each treatment score of the plurality of treatment scores corresponds to a different treatment of a plurality of treatments; wherein each subset of the plurality of subsets includes at least one peptide structure identified from a plurality of peptide structures listed in Table 1;
   [0481] performing a comparison analysis of the plurality of treatment scores;
   [0482] generating a treatment output based on the comparison analysis, wherein the treatment output includes a recommended treatment from the plurality of treatments for treating the subject; and
   [0483] administering the recommended treatment to the patient, the step of administering comprising at least one of intravenous or oral administration of the recommended treatment or a derivative thereof at a therapeutic dosage,
      [0484] wherein the plurality of treatments comprises:
         [0485] a first treatment of pembrolizumab for which the therapeutic dosage of at least one of 200 mg every three weeks, 2 mg/kg every three weeks is administered, or 400 mg every 6 weeks; and
         [0486] a second treatment comprised of nivolumab and ipilimumab for which the therapeutic dosage of either 1 mg/kg nivolumab with 3 mg/kg ipilimumab or 3 mg/kg nivolumab with 1 mg/kg ipilimumab is administered.
            60. A method for managing a treatment for a subject diagnosed with a melanoma condition, the method comprising:
   [0487] receiving sample data for a sample population, wherein the sample data characterizes responses of a plurality of sample subjects diagnosed with the melanoma condition to the treatment and includes sample peptide structure data for a collection of peptide structures for each subject of the plurality of sample subjects;
   [0488] grouping the sample data based on the responses of the plurality of sample subjects into a first group corresponding to a first response classification and a second group corresponding to a second response classification;
   [0489] performing a differential abundance analysis using the sample data to compare the first group of the sample data corresponding to the first response classification and the second group of the sample data corresponding to the second response classification to identify a set of peptide structures from the collection of peptide structures,
      [0490] wherein the set of peptide structures comprises a selected N most differentiating peptide structures between the first response classification and the second response classification; and
   [0491] receiving peptide structure data corresponding to a set of glycoproteins in a biological sample obtained from the subject;
   [0492] computing a treatment score for the treatment using quantification data identified from the peptide structure data for the set of peptide structures; and
   [0493] generating a treatment output that indicates a predicted response to the treatment for the subject using the treatment score.
      61. The method of Embodiment 60, wherein the set of peptide structures includes at least one peptide structure identified from a plurality of peptide structures listed in Table 1.
      62. The method of Embodiment 60 or claim 61, wherein the differential abundance analysis is performed using a Wilcoxon rank-sum test.
      63. The method of any one of Embodiments 60-62, wherein the selected N most differentiating peptide structures is 20 peptide structures.
      64. The method of any one of Embodiments 60-63, wherein:
   [0494] the first response classification is sustained control which indicates an absence of disruption events during a sustained period of time after treatment administration;
   [0495] the second response classification is early disruption which indicates a presence of at least one disruption event during an initial period of time after treatment; and
   [0496] the sustained period of time is longer than the initial period of time.
      65. The method of Embodiment 64, wherein the sustained period of time is 12 months and the initial period of time is 6 months.
      66. A method of treating melanoma in a subject, the method comprising:
   [0497] receiving peptide structure data corresponding to a set of glycoproteins in a biological sample obtained from the subject;
   [0498] computing a treatment score using quantification data identified from the peptide structure data for a set of peptide structures, wherein the set of peptide structures includes at least one peptide structure identified from a plurality of peptide structures listed in Table 1;
   [0499] generating a treatment output using the treatment score; and
   [0500] administering a pembrolizumab treatment to the subject if the treatment output includes at least one of a positive response classification for the pembrolizumab treatment or an identification of the pembrolizumab treatment as a recommended treatment.
      67. The method of Embodiment 66, wherein the administering comprises:
[0501] administering the pembrolizumab treatment at a dosage of 200 mg every 3 weeks.
   68. The method of Embodiment 66, wherein the administering comprises:
[0502] administering the pembrolizumab treatment at a dosage of 2 mg/kg mg every 3 weeks.
   69. The method of Embodiment 66, wherein the administering comprises:
[0503] administering the pembrolizumab treatment at a dosage of 400 mg every 3 weeks.
   70. The method of any one of Embodiments 66-69, wherein the administering comprises:
   [0504] administering the pembrolizumab treatment via an intravenous route of administration.
      71. The method of any one of Embodiments 66-70, wherein the administering comprises:
   [0505] administering the pembrolizumab treatment every three weeks for four doses.
      72. A method of treating melanoma in a subject, the method comprising:
   [0506] receiving peptide structure data corresponding to a set of glycoproteins in a biological sample obtained from the subject;
   [0507] computing a treatment score using quantification data identified from the peptide structure data for a set of peptide structures, wherein the set of peptide structures includes at least one peptide structure identified from a plurality of peptide structures listed in Table 1;
   [0508] generating a treatment output using the treatment score; and
   [0509] administering a combination treatment comprising a combination of nivolumab and ipilimumab to the subject if the treatment output includes at least one of a positive response classification for the combination treatment or an identification of the combination treatment as a recommended treatment.
      73. The method of Embodiment 72, wherein the administering comprises:
   [0510] administering the combination treatment to the subject at a dosage of 1 mg/kg of nivolumab with 3 mg/kg of ipilimumab.
      74. The method of Embodiment 72, wherein the administering comprises:
   [0511] administering the combination treatment to the subject at a dosage of 3 mg/kg of nivolumab with 1 mg/kg of ipilimumab.
      75. The method of any one of Embodiments 72-74, wherein the administering comprises:
   [0512] administering the combination treatment via an intravenous route of administration.
      76. The method of any one of Embodiments 72-75, wherein the administering comprises:
   [0513] administering the combination treatment every three weeks for four doses.
      77. A method of identifying patients with melanoma for treatment with a pembrolizumab treatment, the method comprising:
   [0514] receiving peptide structure data corresponding to a set of glycoproteins in a biological sample obtained from the subject;
   [0515] computing a treatment score using quantification data identified from the peptide structure data for a set of peptide structures, wherein the set of peptide structures includes at least one peptide structure identified from a plurality of peptide structures listed in Table 1; and
   [0516] generating a treatment output using the treatment score,
   [0517] wherein the patient is treated with the pembrolizumab treatment if the treatment output includes at least one of a positive response classification for the pembrolizumab treatment or an identification of the pembrolizumab treatment as a recommended treatment.
      78. The method of Embodiment 77, wherein the pembrolizumab treatment is administered at a dosage of 200 mg every 3 weeks.
      79. The method of Embodiment 77, wherein the pembrolizumab treatment is administered at a dosage of 2 mg/kg mg every 3 weeks.
      80. The method of Embodiment 77, wherein the pembrolizumab treatment is administered at a dosage of 400 mg every 3 weeks.
      81. The method of any one of Embodiments 77-80, wherein the pembrolizumab treatment is administered via an intravenous route of administration.
      82. The method of any one of Embodiments 77-81, wherein the pembrolizumab treatment is administered every three weeks for four doses.
      83. A method of identifying patients with melanoma for treatment with a combination treatment comprising nivolumab and ipilimumab, the method comprising:
   [0518] receiving peptide structure data corresponding to a set of glycoproteins in a biological sample obtained from the subject;
   [0519] computing a treatment score using quantification data identified from the peptide structure data for a set of peptide structures, wherein the set of peptide structures includes at least one peptide structure identified from a plurality of peptide structures listed in Table 1; and
   [0520] generating a treatment output using the treatment score,
   [0521] wherein the patient is treated with the combination treatment if the treatment output includes at least one of a positive response classification for the combination treatment or an identification of the combination treatment as a recommended treatment.
      84. The method of Embodiment 83, wherein the combination treatment is administered at a dosage of 1 mg/kg of nivolumab combined with 3 mg/kg of ipilimumab.
      85. The method of Embodiment 83, wherein the combination treatment is administered at a dosage of 3 mg/kg of nivolumab combined with 1 mg/kg of ipilimumab.
      86. The method of any one of Embodiments 83-85, wherein the combination treatment is administered via an intravenous route of administration.
      87. The method of any one of Embodiments 83-86, wherein the combination treatment is administered every three weeks for four doses.
      88. A method for analyzing a set of peptide structures in a sample from a patient, the method comprising:
[0522] (a) obtaining the sample from the patient;
   [0523] (b) preparing the sample to form a prepared sample comprising a set of peptide structures;
   [0524] (c) inputting the prepared sample into a reaction monitoring mass spectrometry system to detect a set of product ions associated with each peptide structure of the set of peptide structures,
      [0525] wherein the set of peptide structures includes at least one peptide structure selected from peptide structures PS-1 to PS-38 identified in Table 6;
      [0526] wherein the set of peptide structures includes a peptide structure that is characterized as having:
         [0527] (i) a precursor ion with a mass-charge (m/z) ratio within ±1.5 of the m/z ratio listed for the precursor ion in Table 6 as corresponding to the peptide structure; and
         [0528] (ii) a product ion having an m/z ratio within ±1.0 of the m/z ratio listed for the first product ion in Table 6 as corresponding to the peptide structure; and
   [0529] (d) generating quantification data for the set of product ions using the reaction monitoring mass spectrometry system.
      89. The method of Embodiment 88, wherein the mass-charge (m/z) ratio of the precursor ion is within ±1.0 of the m/z ratio listed for the precursor ion in Table 6 as corresponding to the peptide structure.
      90. The method of Embodiment 88, wherein the mass-charge (m/z) ratio of the precursor ion is within ±0.5 of the m/z ratio listed for the precursor ion in Table 6 as corresponding to the peptide structure.
      91. The method of any one of Embodiments 88-90, wherein the mass-charge (m/z) ratio of the product ion is within ±0.8 of the m/z ratio listed for the precursor ion in Table 6 as corresponding to the peptide structure.
      92. The method of any one of Embodiments 88-90, wherein the mass-charge (m/z) ratio of the product ion is within ±0.5 of the m/z ratio listed for the precursor ion in Table 6 as corresponding to the peptide structure.
      93. The method of any one of Embodiments 88-92, further comprising:
   [0530] generating a treatment output using the quantification data to treat a subject diagnosed with a melanoma condition.
      94. The method of any one of Embodiments 88-93, wherein the reaction monitoring mass spectrometry system uses at least one of multiple reaction monitoring mass spectrometry (MRM-MS), or selected reaction monitoring mass spectrometry (SRM-MS) to detect the set of product ions and generate the quantification data.
      95. The method of any one of Embodiments 88-94, wherein the sample comprises a plasma sample.
      96. The method of any one of Embodiments 88-94, wherein the sample comprises a serum sample.
      97. The method of any one of Embodiment 88-96, wherein preparing the sample comprises at least one of:
   [0531] denaturing one or more proteins in the sample to form one or more denatured proteins;
   [0532] reducing the one or more denatured proteins in the sample to form one or more reduced proteins;
   [0533] alkylating the one or more proteins in the sample using an alkylating agent to prevent reformation of disulfide bonds in the one or more reduced proteins to form one or more alkylated proteins; or
   [0534] digesting the one or more alkylated proteins in the sample using a proteolysis catalyst to form the prepared sample comprising the set of peptide structures.
      98. A composition comprising at least one of peptide structures PS-1 to PS-38 identified in Table 1.
      99. A composition comprising a peptide structure or a product ion, wherein:
   [0535] the peptide structure or product ion comprises the amino acid sequence having at least 90% sequence identity to any one of SEQ ID NOS: 21-46, corresponding to peptide structures PS-1 to PS-38 in Table 1; and
   [0536] the product ion is selected as one from a group consisting of product ions identified in Table 6 including product ions falling within an identified m/z range.
      100. A composition comprising a glycopeptide structure selected as one from a group consisting of peptide structures PS-1 to PS-38 identified in Table 6, wherein:
   [0537] the glycopeptide structure comprises:
      [0538] an amino acid peptide sequence identified in Table 5 as corresponding to the glycopeptide structure; and
      [0539] a glycan structure identified in Table 1 as corresponding to the glycopeptide structure in which the glycan structure is linked to a residue of the amino acid peptide sequence at a corresponding position identified in Table 1; and wherein the glycan structure has a glycan composition.
         101. The composition of Embodiment 100, wherein the glycan composition is identified in Table 7.
         102. The composition of Embodiment 100 or claim 101, wherein:
   [0540] the glycopeptide structure has a precursor ion having a charge identified in Table 6 as corresponding to the glycopeptide structure.
      103. The composition of any one of Embodiments 100-101, wherein:
   [0541] the glycopeptide structure has a precursor ion with an m/z ratio within ±1.5 of the m/z ratio listed for the precursor ion in Table 6 as corresponding to the glycopeptide structure.
      104. The composition of any one of Embodiments 100-101, wherein:
   [0542] the glycopeptide structure has a precursor ion with an m/z ratio within ±1.0 of the m/z ratio listed for the precursor ion in Table 6 as corresponding to the glycopeptide structure.
      105. The composition of any one of Embodiments 100-101, wherein:
   [0543] the glycopeptide structure has a precursor ion with an m/z ratio within ±0.5 of the m/z ratio listed for the precursor ion in Table 6 as corresponding to the glycopeptide structure.
      106. The composition of any one of Embodiments 100-105, wherein:
   [0544] the glycopeptide structure has a product ion with an m/z ratio within ±1.0 of the m/z ratio listed for the first product ion in Table 6 as corresponding to the glycopeptide structure.
      107. The composition of any one of Embodiments 100-105, wherein:
   [0545] the glycopeptide structure has a product ion with an m/z ratio within ±0.8 of the m/z ratio listed for the first product ion in Table 6 as corresponding to the glycopeptide structure.
      108. The composition of any one of Embodiments 100-105, wherein:
   [0546] the glycopeptide structure has a product ion with an m/z ratio within ±0.5 of the m/z ratio listed for the first product ion in Table 6 as corresponding to the glycopeptide structure.
      109. The composition of any one of Embodiments 100-108, wherein the glycopeptide structure has a monoisotopic mass identified in Table 1 as corresponding to the glycopeptide structure.
      110. A composition comprising a peptide structure selected as one from a plurality of peptide structures identified in Table 1, wherein:
   [0547] the peptide structure has a monoisotopic mass identified as corresponding to the peptide structure in Table 1; and
   [0548] the peptide structure comprises the amino acid sequence of SEQ ID NOs: 21-46 identified in Table 1 as corresponding to the peptide structure.
      111. The composition of Embodiment 110, wherein:
   [0549] the peptide structure has a precursor ion having a charge identified in Table 6 as corresponding to the peptide structure.
      112. The composition of Embodiment 110, wherein:
   [0550] the peptide structure has a precursor ion with an m/z ratio within ±1.5 of the m/z ratio listed for the precursor ion in Table 6 as corresponding to the peptide structure.
      113. The composition of Embodiment 110, wherein:
   [0551] the peptide structure has a precursor ion with an m/z ratio within ±1.0 of the m/z ratio listed for the precursor ion in Table 6 as corresponding to the peptide structure.
      114. The composition of Embodiment 110, wherein:
   [0552] the peptide structure has a precursor ion with an m/z ratio within ±0.5 of the m/z ratio listed for the precursor ion in Table 6 as corresponding to the peptide structure.
      115. The composition of any one of Embodiments 110-114, wherein:
   [0553] the peptide structure has a product ion with an m/z ratio within ±1.0 of the m/z ratio listed for the first product ion in Table 6 as corresponding to the peptide structure.
      116. The composition of any one of Embodiments 110-114, wherein:
   [0554] the peptide structure has a product ion with an m/z ratio within ±0.8 of the m/z ratio listed for the first product ion in Table 6 as corresponding to the peptide structure.
      117. The composition of any one of Embodiments 110-114, wherein:
   [0555] the peptide structure has a product ion with an m/z ratio within ±0.5 of the m/z ratio listed for the first product ion in Table 6 as corresponding to the peptide structure.
      118. A kit comprising at least one agent for quantifying at least one peptide structure identified in Table 1 to carry out at least a portion of the method of any one of claims 1-87.
      119. A kit comprising at least one of a glycopeptide standard, a buffer, or a set of peptide sequences to carry out at least a portion of the method of any one of claims 1-87, a peptide sequence of the set of peptide sequences identified by a corresponding one of SEQ ID NOS: 21-46, defined in Table 1.
      120. A system comprising:
   [0556] one or more data processors; and
      [0557] a non-transitory computer readable storage medium containing instructions which, when executed on the one or more data processors, cause the one or more data processors to perform part or all of any one of claims 1-87.
         121. A computer-program product tangibly embodied in a non-transitory machine-readable storage medium, including instructions configured to cause one or more data processors to perform part or all of any one of claims 1-87.
         122. A method for identifying one or more glycopeptide biomarkers predictive of a disease or a condition in a subject, the method comprising:
   [0558] obtaining from a subject a first sample at a first timepoint and a second sample at a second timepoint, wherein the first sample and the second sample comprise a glycoprotein;
   [0559] fragmenting the glycoprotein in the first sample or the second sample into one or more glycopeptides, wherein the one or more glycopeptides comprise one or more amino acid sequences selected from a group consisting of SEQ ID NO: 21-46, 101-131, and 159-207, and combinations thereof;
   [0560] determining an amount of the one or more glycopeptides using multiple reaction monitoring mass spectrometry (MRM-MS);
   [0561] associating the amount of the one or more glycopeptides with the first timepoint or the second timepoint, wherein the subject has a change in a disease or a condition from the first timepoint to the second timepoint; and
   [0562] identifying as glycopeptide biomarkers the glycopeptide where the amount of the one or more glycopeptides changed from the first timepoint to the second timepoint.
      123. A method for identifying one or more glycopeptide biomarkers predictive of a disease or a condition in a subject, the method comprising:
   [0563] obtaining, by a computer, data of an amount of one or more glycopeptides for a set (n) of subjects, wherein the one or more glycopeptides are generated by fragmenting a glycoprotein in a sample from a subject, the amount of one or more glycopeptides are determined using multiple reaction monitoring mass spectrometry (MRM-MS), and the data for each subject comprises data from samples taken at a plurality of timepoints;
   [0564] selecting, by the computer, a subset of the one or more glycopeptides to include in a predictive model;
   [0565] assessing, by the computer, the predictive model using a cross-validation with n−1 subjects to generate an outcome score for a holdout subject;
   [0566] iterating, by the computer, step (c) for each of n subjects as the holdout subject to generate an outcome score for each subject;
   [0567] dichotomizing, by the computer, the outcome scores for each subject at a cutoff outcome score as below or above the cutoff outcome score;
   [0568] analyzing, by the computer, the amount of one or more glycopeptides for subjects having outcome scores above the cutoff outcome score to the amount of one or more glycopeptides for subjects having outcome scores below the cutoff outcome score for each glycopeptide in the subset of the one or more glycopeptides to determine a hazard ratio and an interaction p-value for each glycopeptide;
   [0569] identifying, by the computer, the glycopeptide having the interaction p-value ≤0.05 as a glycopeptide biomarker for predicting the disease or the condition.
      124. A method for identifying one or more glycopeptide biomarkers predictive of a disease or a condition in a subject, the method comprising:
   [0570] obtaining, by a computer, data of an amount of one or more glycopeptides for a set (n) of subjects, wherein the one or more glycopeptides are generated by fragmenting a glycoprotein in a sample from a subject, the amount of one or more glycopeptides are determined using multiple reaction monitoring mass spectrometry (MRM-MS), and the data for each subject comprises data from samples taken at a plurality of timepoints;
   [0571] selecting, by the computer, a subset of the one or more glycopeptides to include in a predictive model;
   [0572] assessing, by the computer, the predictive model using a cross-validation with n−1 subjects to generate an outcome score for a holdout subject;
   [0573] iterating, by the computer, step (c) for each of n subjects as the holdout subject to generate an outcome score for each subject;
   [0574] dichotomizing, by the computer, the outcome scores for each subject at a cutoff outcome score as below or above the cutoff outcome score;
   [0575] analyzing, by the computer, the amount of one or more glycopeptides for subjects having outcome scores above the cutoff outcome score to the amount of one or more glycopeptides for subjects having outcome scores below the cutoff outcome score for each glycopeptide in the subset of the one or more glycopeptides to determine a hazard ratio and an interaction p-value for each glycopeptide;
   [0576] identifying, by the computer, the glycopeptide having the interaction p-value ≤0.05 as a glycopeptide biomarker for predicting the disease or the condition.
      125. A method for assessing a status of a condition and a treatment in a subject, the method comprising:
   [0577] fragmenting a glycoprotein in a sample from a subject into one or more glycopeptides, wherein the sample comprises one or more of glycoproteins, glycans, or glycopeptides;
   [0578] performing mass spectroscopy (MS) on the one or more glycopeptides using multiple reaction monitoring mass spectrometry (MRM-MS) to quantify an amount of the one or more glycopeptides in the sample, wherein the one or more glycopeptides comprise one or more amino acid sequences selected from a group consisting of SEQ ID NOs: 7, 9, 12, 15, 16, 18, 20, 30, 34, 37, 44, 59, 60, 61, 62, 66, 69, 70, 75, 77, 80, and 83, and combinations thereof;
   [0579] inputting data of the amount of the one or more glycopeptides into a trained model to generate an output probability, wherein the output probability is indicative of whether a treatment positively influences an outcome of the subject having a condition; and
   [0580] generating a treatment recommendation based on the output probability,
   [0581] wherein the condition is melanoma and the treatment comprises checkpoint inhibitors.
      126. A method for assessing a status of a condition and a treatment in a subject, the method comprising:
   [0582] fragmenting a glycoprotein in a sample from a subject into one or more glycopeptides, wherein the sample comprises one or more of glycoproteins, glycans, or glycopeptides;
   [0583] performing mass spectroscopy (MS) on the one or more glycopeptides using multiple reaction monitoring mass spectrometry (MRM-MS) to quantify an amount of the one or more glycopeptides in the sample, wherein the one or more glycopeptides comprise one or more amino acid sequences selected from a group consisting of SEQ ID NOs: 300-429, and combinations thereof;
   [0584] inputting data of the amount of the one or more glycopeptides into a trained model to generate an output probability, wherein the output probability is indicative of whether a treatment positively influences an outcome of the subject having a condition; and
   [0585] generating a treatment recommendation based on the output probability,
   [0586] wherein the condition is non-small cell lung cancer (NSCLC) and the treatment comprises checkpoint inhibitors.
      127. A glycopeptide comprising an amino acid sequence selected from a group consisting of SEQ ID NOs: 300-429, and combinations thereof.
      128. A kit comprising a glycopeptide standard comprising a glycopeptide comprising one or more amino acid sequences selected from a group consisting of SEQ ID NOs: 300-429, and an instruction for using the glycopeptide standard for treating cancer.
      129. The method of any one of Embodiments 122-125, wherein fragmenting comprises protease digestion.
      130. The method of any one of Embodiments 122-125, wherein fragmenting comprises applying a mechanical force.
      131. The method of any one of Embodiments 122-125, wherein the amount of one or more glycopeptides measures multiple reaction monitoring (MRM) transitions.
      132. The method of Embodiment 122, further generating a panel of glycopeptide biomarkers comprising one or more of the glycopeptide biomarkers identified in step (e).
      133. The method of Embodiment 123, wherein the cross-validation is leave-one-out cross-validation (LOOCV).
      134. The method of Embodiment 123, wherein the cutoff outcome score was determined to optimize Harrell's C-index.
      135. The method of Embodiment 123, wherein the interaction p-value is less than or equal to 0.01, 0.005, or 0.001 in step (g).
      136. The method of any one of Embodiments 125-126, wherein the outcome comprises overall survival time.
      137. The method of any one of Embodiments 125-126, wherein the outcome comprises progression-free survival time.
      138. The method of any one of Embodiments 125-126, wherein the treatment comprises one or more of ipilimumab, nivolumab, and pembrolizumab.
      139. The method of any one of Embodiments 125-126, wherein the treatment comprises one or more of PD-1-, PD-L1-, and CTLA-4-inhibitors.
      140. The method of any one of Embodiments 125-126, wherein the treatment comprises chemotherapy.
      141. The method of any one of Embodiments 125-126, wherein the chemotherapy comprises one or more of carboplatin and pemetrexed.
      142. The method of any one of Embodiments 125-126, wherein the recommendation comprises continuing the treatment if the output probability indicates the treatment positively influences the outcome.
      1. A method for managing a treatment for a subject diagnosed with a melanoma or non-small cell lung cancer condition, the method comprising:
   [0587] receiving peptide structure data corresponding to a set of glycoproteins in a biological sample obtained from the subject;
   [0588] computing a treatment score using quantification data identified from the peptide structure data for a set of peptide structures, wherein the set of peptide structures includes at least one peptide structure identified from a plurality of peptide structures listed in Table 7, Table 12, Table 14, or Table 16;
   [0589] generating a treatment output that indicates a predicted response to the treatment for the subject using the treatment score.
      2. The method of embodiment 1A, wherein generating the treatment output comprises:
   [0590] generating the predicted response to the treatment based on whether the treatment score is above a selected threshold.
      3. The method of embodiment 2A, wherein the selected threshold is 0.5.
      4. The method of embodiment 2A, wherein the generating the predicted response comprises:
   [0591] identifying a first predicted response classification for the subject when the treatment score is above 0.5; and
   [0592] identifying a second predicted response classification for the subject when the treatment score is not above 0.5.
      5. The method of embodiment 4A, wherein the first predicted response classification is sustained control and wherein the second predicted response classification is early disruption.
      6. The method of any one of embodiments 1A-5A, wherein the treatment is pembrolizumab and wherein the set of peptide structures includes at least one peptide structure identified from a plurality of peptide structures listed in Table 2.
      7. The method of any one of embodiments 1A-6A, wherein the condition is melanoma and the treatment comprises a combination of nivolumab and ipilimumab and wherein the set of peptide structures includes at least one peptide structure identified from a plurality of peptide structures listed in Table 3.
      8. The method of any one of embodiments 1A-7A, wherein the treatment outcome comprises a recommendation to modify a treatment plan for the subject.
      9. The method of embodiment 8A, wherein the recommendation for modifying the treatment plan includes at least one of selecting a different treatment for the subject, altering a dosage for the treatment, or combining the treatment with at least one other treatment.
      10. The method of any one of embodiments 1A-9A, wherein computing the treatment score comprises:
   [0593] computing a proportion of the set of peptide structures having a selected abundance greater than a reference abundance.
      11. The method of embodiment 10A, wherein the reference abundance for a peptide structure of the set of peptide structures is a median of a plurality of abundances for the peptide structure across a sample population and wherein the selected abundance for a glycopeptide structure of the set of peptide structures is a relative abundance and the selected abundance for an aglycosylated peptide structure of the set of peptide structures is an absolute abundance.
      12. The method of any one of embodiments 1A-11A, further comprising:
   [0594] identifying the set of peptide structures using sample data and a statistical algorithm that identifies a relative significance for each peptide structure of a collection of peptide structures corresponding to the sample data.
      13. The method of embodiment 12A, wherein the statistical algorithm comprises a Wilcoxon rank-sum test.
      14. The method of embodiment 12A or embodiment 13A, wherein identifying the set of peptide structures comprises:
   [0595] performing a differential abundance analysis using the sample data to compare a first portion of the sample data corresponding to a first response classification for the treatment and a second portion of the sample data corresponding to a second response classification for the treatment to identify a selected N most differentiating peptide structures between the first response classification and the second response classification.
      15. The method of embodiment 14A, wherein the selected N most differentiating peptide structures is 20 peptide structures.
      16. The method of embodiment 14A or embodiment 15A, wherein:
   [0596] the first response classification is sustained control which indicates an absence of disruption events during a sustained period of time after treatment administration;
   [0597] the second response classification is early disruption which indicates a presence of at least one disruption event during an initial period of time after treatment; and
   [0598] the sustained period of time is longer than the initial period of time.
      17. The method of embodiment 16A, wherein the sustained period of time is 12 months and the initial period of time is 6 months.
      18. The method of any one of embodiments 1A-17A, wherein the at least one peptide structure comprises a glycopeptide structure defined by a peptide sequence and a glycan structure linked to the peptide sequence at a linking site of the peptide sequence, as identified in Table 1, with the peptide sequence being one of SEQ ID NOS: 21-46 as defined in Table 7.
      19. The method of any one of embodiments 1A-18A, wherein the quantification data for a peptide structure of the set of peptide structures comprises at least one of an adjusted abundance, a relative abundance, an absolute abundance, a normalized abundance, a relative quantity, an adjusted quantity, a normalized quantity, a relative concentration, an adjusted concentration, or a normalized concentration.
      20. The method of any one of embodiments 1A-19A, wherein the peptide structure data is generated using multiple reaction monitoring mass spectrometry (MRM-MS).
      21. The method of any one of embodiments 1A-20A, further comprising:
   [0599] creating a sample from the biological sample; and preparing the sample using reduction, alkylation, and enzymatic digestion to form a prepared sample that includes a set of peptide structures.
      22. The method of embodiment 21A, further comprising:
   [0600] generating the peptide structure data from the prepared sample using multiple reaction monitoring mass spectrometry (MRM-MS).
      23. The method of any one of embodiments 1A-22A, wherein the treatment output comprises at least one of a design for the treatment or a therapeutic dosage for the treatment.
      24. The method of any one of embodiments 1A-23A, further comprising:
   [0601] sending the treatment output to a remote system.
      25. The method of any one of embodiments 1A-24A, further comprising:
   [0602] administering a therapeutic dosage of the treatment based on the predicted response being a predicted response classification that indicates the treatment will be successful.
      26. The method of any one of embodiments 1A-25A, further comprising:
   [0603] administering a therapeutic dosage of the treatment based on the predicted response being sustained control.
      27. A method for treatment management of a subject diagnosed with a melanoma or non-small cell lung cancer condition, the method comprising:
   [0604] receiving peptide structure data corresponding to a set of peptide structures associated with a set of glycoproteins in a biological sample obtained from the subject;
   [0605] computing a plurality of treatment scores using quantification data identified from the peptide structure data for a plurality of subsets of the set of peptide structures, wherein each treatment score of the plurality of treatment scores corresponds to a different treatment of a plurality of treatments; wherein each subset of the plurality of subsets includes at least one peptide structure identified from a plurality of peptide structures listed in Table 1, Table 12, Table 14, or Table 16;
   [0606] performing a comparison analysis of the plurality of treatment scores; and
   [0607] generating a treatment output based on the comparison analysis, wherein the treatment output includes a recommended treatment plan for treating the subject.
      28. The method of embodiment 27A, wherein generating the treatment output comprises:
   [0608] identifying a treatment of the plurality of treatments having a highest treatment score as a recommended treatment for treating the subject.
      29. The method of embodiment 27A or embodiment 28A, wherein the condition is melanoma and the plurality of treatments comprises a first treatment of pembrolizumab and a second treatment that is comprised of nivolumab and ipilimumab.
      30. The method of any one of embodiments 27A-29A, wherein performing the comparison analysis comprises:
   [0609] determining that a treatment of the plurality of treatments has a treatment score below a selected threshold; and
   [0610] excluding the treatment from the comparison analysis.
      31. The method of embodiment 30A, wherein the selected threshold is 0.5.
      32. The method of any one of embodiments 27A-31A, wherein the generating the treatment output comprises:
   [0611] identifying a predicted response classification for the subject for each treatment of the plurality of treatments using a corresponding treatment score of the plurality of treatment scores.
      33. The method of embodiment 32A, wherein the predicted response classification is sustained control when the corresponding treatment score is above a selected threshold and is early disruption when the corresponding treatment score is not above the selected threshold.
      34. The method of embodiment 33A, wherein the selected threshold is 0.5.
      35. The method of any one of embodiments 27A-34A, wherein generating the treatment output comprises:
   [0612] identifying a treatment of the plurality of treatments having a highest treatment score;
   [0613] determining that the highest treatment score is not above a selected threshold; and
   [0614] generating the treatment output with the recommended treatment plan including a recommendation to modify an existing treatment plan for the subject.
      36. The method of embodiment 35A, wherein the recommendation for modifying the existing treatment plan includes at least one of selecting a different treatment for the subject, altering a dosage for a treatment that is part of the existing treatment plan, or combining the treatment with at least one other treatment.
      37. The method of any one of embodiments 27A-36A, wherein generating the treatment output comprises:
   [0615] identifying a treatment of the plurality of treatments having a highest treatment score as a highest-scored treatment;
   [0616] determining that the highest treatment score is above a selected threshold; and
   [0617] generating the treatment output with the recommended treatment plan identifying the highest-score treatment as a recommended treatment for treating the subject.
      38. The method of any one of embodiments 27A-37A, wherein the condition is melanoma and wherein a first treatment of the plurality of treatments comprises pembrolizumab, wherein a second treatment of the plurality of treatments comprises a combination of nivolumab and ipilimumab, and wherein computing the plurality of treatment scores comprises:
   [0618] computing a first treatment score for the first treatment using a first portion of the quantification data identified from the peptide structure data for a first subset of the plurality of subsets of the set of peptide structures, wherein the first subset includes at least one peptide structure identified from a plurality of peptide structures listed in Table 2; and
   [0619] computing a second treatment score for the second treatment using a second portion of the quantification data identified from the peptide structure data for a second subset of the plurality of subsets of the set of peptide structures, wherein the second subset includes at least one peptide structure identified from a plurality of peptide structures listed in Table 3.
      39. The method of any one of embodiments 27A-38A, wherein computing the plurality of treatment scores comprises:
   [0620] computing a proportion of a subset of the plurality of subsets of the set of peptide structures having a selected abundance greater than a reference abundance as a treatment score of the plurality of treatment scores.
      40. The method of embodiment 39A, wherein the reference abundance for a peptide structure of the set of peptide structures is a median of a plurality of abundances for the peptide structure across a sample population and wherein the selected abundance for a glycopeptide structure of the set of peptide structures is a relative abundance and the selected abundance for an aglycosylated peptide structure of the set of peptide structures is an absolute abundance.
      41. The method of any one of embodiments 27A-40A, further comprising:
   [0621] identifying a subset of the plurality of subsets of the set of peptide structures using sample data and a statistical algorithm that identifies a relative significance for each peptide structure of a collection of peptide structures corresponding to the sample data with respect to a response to a selected treatment of the plurality of treatments.
      42. The method of embodiment 41A, wherein the statistical algorithm comprises a Wilcoxon rank-sum test.
      43. The method of embodiment 41A or embodiment 42A, wherein identifying the subset comprises:
   [0622] performing a differential abundance analysis using the sample data to compare a first portion of the sample data corresponding to a first response classification for the selected treatment and a second portion of the sample data corresponding to a second response classification for the selected treatment to identify a selected N most differentiating peptide structures between the first response classification and the second response classification.
      44. The method of embodiment 43A, wherein the selected N most differentiating peptide structures is 20 peptide structures.
      45. The method of embodiment 43A or embodiment 44A, wherein:
   [0623] the first response classification is sustained control which indicates an absence of disruption events during a sustained period of time after treatment administration;
   [0624] the second response classification is early disruption which indicates a presence of at least one disruption event during an initial period of time after treatment; and
   [0625] the sustained period of time is longer than the initial period of time.
      46. The method of embodiment 45, wherein the sustained period of time is 12 months and the initial period of time is 6 months.
      47. The method of any one of embodiments 27A-46A, wherein the at least one peptide structure comprises a glycopeptide structure defined by a peptide sequence and a glycan structure linked to the peptide sequence at a linking site of the peptide sequence, as identified in Table 1, with the peptide sequence being one of SEQ ID NOS: 21-46 as defined in Table 7.
      48. The method of any one of embodiments 27A-47A, wherein the quantification data for a peptide structure of the set of peptide structures comprises at least one of an adjusted abundance, a relative abundance, an absolute abundance, a normalized abundance, a relative quantity, an adjusted quantity, a normalized quantity, a relative concentration, an adjusted concentration, or a normalized concentration.
      49. The method of claim any one of embodiments 27A-48A, wherein the peptide structure data is generated using multiple reaction monitoring mass spectrometry (MRM-MS).
      50. The method of any one of embodiments 27A-49A, further comprising:
[0626] creating a sample from the biological sample; and
   [0627] preparing the sample using reduction, alkylation, and enzymatic digestion to form a prepared sample that includes a set of peptide structures.
      51. The method of embodiment 50A, further comprising:
   [0628] generating the peptide structure data from the prepared sample using multiple reaction monitoring mass spectrometry (MRM-MS).
      52. The method of any one of embodiments 27A-51A, wherein the recommended treatment plan identifies a recommended treatment and a therapeutic dosage for the recommended treatment.
      53. The method of embodiment 52A, further comprising:
   [0629] administering a therapeutic dosage of the recommended.
      54. The method of any one of embodiments 27A-53A, further comprising:
   [0630] sending the treatment output to a remote system.
      55. A method for treatment management of a subject diagnosed with a melanoma condition, the method comprising:
   [0631] receiving peptide structure data corresponding to a set of peptide structures associated with a set of glycoproteins in a biological sample obtained from the subject;
   [0632] computing a first treatment score for a first treatment of pembrolizumab using first quantification data identified from the peptide structure data for a first subset of the set of peptide structures, wherein the first subset includes at least one peptide structure identified from a plurality of peptide structures listed in Table 2;
   [0633] computing a second treatment score for a second treatment comprised of nivolumab and ipilimumab using second quantification data identified from the peptide structure data for a second subset of the set of peptide structures, wherein the second subset includes at least one peptide structure identified from a plurality of peptide structures listed in Table 3;
   [0634] performing a comparison analysis of the first treatment score and the second treatment score; and
   [0635] generating a treatment output based on the comparison analysis, wherein the treatment output identifies one of the first treatment and the second treatment as a recommended treatment for the subject.
      56. The method of embodiment 55A, wherein computing the first treatment score comprises:
   [0636] computing a proportion of the first subset having a selected abundance greater than a reference abundance as the first treatment score.
      57. The method of embodiment 55A or embodiment 56A, wherein computing the second treatment score comprises:
   [0637] computing a proportion of the second subset having a selected abundance greater than a reference abundance as the second treatment score.
      58. A method for treating a subject diagnosed with a melanoma or non-small cell lung cancer condition, comprising:
   [0638] receiving peptide structure data corresponding to a set of glycoproteins in a biological sample obtained from the subject;
   [0639] computing a treatment score using quantification data identified from the peptide structure data for a set of peptide structures, wherein the set of peptide structures includes at least one peptide structure identified from a plurality of peptide structures listed in Table 1, Table 12, Table 14, or Table 16;
   [0640] generating a treatment output that indicates a predicted response to a treatment for the subject using the treatment score; and
   [0641] administering the treatment to the patient in response to the predicted response includes a positive response classification, the step of administering comprising at least one of intravenous or oral administration of the recommended treatment or a derivative thereof at a therapeutic dosage,
      [0642] wherein the treatment is selected as one from a group consisting of:
         [0643] a first treatment of pembrolizumab for which the therapeutic dosage of at least one of 200 mg every three weeks, 2 mg/kg every three weeks is administered, or 400 mg every 6 weeks; and
         [0644] a second treatment comprised of nivolumab and ipilimumab for which the therapeutic dosage of either 1 mg/kg nivolumab with 3 mg/kg ipilimumab or 3 mg/kg nivolumab with 1 mg/kg ipilimumab is administered.
            59. A method for treating a subject diagnosed with a melanoma condition, comprising:
   [0645] receiving peptide structure data corresponding to a set of peptide structures associated with a set of glycoproteins in a biological sample obtained from the subject;
   [0646] computing a plurality of treatment scores using quantification data identified from the peptide structure data for a plurality of subsets of the set of peptide structures, wherein each treatment score of the plurality of treatment scores corresponds to a different treatment of a plurality of treatments; wherein each subset of the plurality of subsets includes at least one peptide structure identified from a plurality of peptide structures listed in Table 1, Table 12, Table 14, or Table 16;
   [0647] performing a comparison analysis of the plurality of treatment scores;
   [0648] generating a treatment output based on the comparison analysis, wherein the treatment output includes a recommended treatment from the plurality of treatments for treating the subject; and
   [0649] administering the recommended treatment to the patient, the step of administering comprising at least one of intravenous or oral administration of the recommended treatment or a derivative thereof at a therapeutic dosage,
      [0650] wherein the plurality of treatments comprises:
         [0651] a first treatment of pembrolizumab for which the therapeutic dosage of at least one of 200 mg every three weeks, 2 mg/kg every three weeks is administered, or 400 mg every 6 weeks; and
         [0652] a second treatment comprised of nivolumab and ipilimumab for which the therapeutic dosage of either 1 mg/kg nivolumab with 3 mg/kg ipilimumab or 3 mg/kg nivolumab with 1 mg/kg ipilimumab is administered.
            60. A method for managing a treatment for a subject diagnosed with a melanoma or non-small cell lung cancer condition, the method comprising:
   [0653] receiving sample data for a sample population, wherein the sample data characterizes responses of a plurality of sample subjects diagnosed with the melanoma or non-small cell lung cancer condition to the treatment and includes sample peptide structure data for a collection of peptide structures for each subject of the plurality of sample subjects;
   [0654] grouping the sample data based on the responses of the plurality of sample subjects into a first group corresponding to a first response classification and a second group corresponding to a second response classification;
   [0655] performing a differential abundance analysis using the sample data to compare the first group of the sample data corresponding to the first response classification and the second group of the sample data corresponding to the second response classification to identify a set of peptide structures from the collection of peptide structures,
      [0656] wherein the set of peptide structures comprises a selected N most differentiating peptide structures between the first response classification and the second response classification; and
   [0657] receiving peptide structure data corresponding to a set of glycoproteins in a biological sample obtained from the subject;
   [0658] computing a treatment score for the treatment using quantification data identified from the peptide structure data for the set of peptide structures; and
   [0659] generating a treatment output that indicates a predicted response to the treatment for the subject using the treatment score.
      61. The method of embodiment 60A, wherein the set of peptide structures includes at least one peptide structure identified from a plurality of peptide structures listed in Table 1, Table 12, Table 14, or Table 16.
      62. The method of embodiment 60A or embodiment 61A, wherein the differential abundance analysis is performed using a Wilcoxon rank-sum test.
      63. The method of any one of embodiments 60A-62A, wherein the selected N most differentiating peptide structures is 20 peptide structures.
      64. The method of any one of embodiment 60A-63A, wherein:
   [0660] the first response classification is sustained control which indicates an absence of disruption events during a sustained period of time after treatment administration;
   [0661] the second response classification is early disruption which indicates a presence of at least one disruption event during an initial period of time after treatment; and
   [0662] the sustained period of time is longer than the initial period of time.
      65. The method of embodiment 64A, wherein the sustained period of time is 12 months and the initial period of time is 6 months.
      66. A method of treating melanoma or non-small cell lung cancer in a subject, the method comprising:
   [0663] receiving peptide structure data corresponding to a set of glycoproteins in a biological sample obtained from the subject;
   [0664] computing a treatment score using quantification data identified from the peptide structure data for a set of peptide structures, wherein the set of peptide structures includes at least one peptide structure identified from a plurality of peptide structures listed in Table 1, Table 12, Table 14, or Table 16;
   [0665] generating a treatment output using the treatment score; and
   [0666] administering a pembrolizumab treatment to the subject if the treatment output includes at least one of a positive response classification for the pembrolizumab treatment or an identification of the pembrolizumab treatment as a recommended treatment.
      67. The method of embodiment 66A, wherein the administering comprises:
[0667] administering the pembrolizumab treatment at a dosage of 200 mg every 3 weeks.
   68. The method of embodiment 66A, wherein the administering comprises:
[0668] administering the pembrolizumab treatment at a dosage of 2 mg/kg mg every 3 weeks.
   69. The method of embodiment 66A, wherein the administering comprises:
[0669] administering the pembrolizumab treatment at a dosage of 400 mg every 3 weeks.
   70. The method of any one of embodiments 66A-69A, wherein the administering comprises:
   [0670] administering the pembrolizumab treatment via an intravenous route of administration.
      71. The method of any one of embodiments 66A-70A, wherein the administering comprises:
   [0671] administering the pembrolizumab treatment every three weeks for four doses.
      72. A method of treating melanoma or non-small cell lung cancer in a subject, the method comprising:
   [0672] receiving peptide structure data corresponding to a set of glycoproteins in a biological sample obtained from the subject;
   [0673] computing a treatment score using quantification data identified from the peptide structure data for a set of peptide structures, wherein the set of peptide structures includes at least one peptide structure identified from a plurality of peptide structures listed in Table 1, Table 12, Table 14, or Table 16;
   [0674] generating a treatment output using the treatment score; and
   [0675] administering a combination treatment comprising a combination of nivolumab and ipilimumab to the subject if the treatment output includes at least one of a positive response classification for the combination treatment or an identification of the combination treatment as a recommended treatment.
      73. The method of embodiment 72A, wherein the administering comprises:
   [0676] administering the combination treatment to the subject at a dosage of 1 mg/kg of nivolumab with 3 mg/kg of ipilimumab.
      74. The method of embodiment 72A, wherein the administering comprises:
   [0677] administering the combination treatment to the subject at a dosage of 3 mg/kg of nivolumab with 1 mg/kg of ipilimumab.
      75. The method of any one of embodiments 72A-74A, wherein the administering comprises:
   [0678] administering the combination treatment via an intravenous route of administration.
      76. The method of any one of embodiments 72A-75A, wherein the administering comprises:
   [0679] administering the combination treatment every three weeks for four doses.
      77. A method of identifying patients with melanoma or non-small cell lung cancer for treatment with a pembrolizumab treatment, the method comprising:
   [0680] receiving peptide structure data corresponding to a set of glycoproteins in a biological sample obtained from the subject;
   [0681] computing a treatment score using quantification data identified from the peptide structure data for a set of peptide structures, wherein the set of peptide structures includes at least one peptide structure identified from a plurality of peptide structures listed in Table 1, Table 12, Table 14, or Table 16; and
   [0682] generating a treatment output using the treatment score,
   [0683] wherein the patient is treated with the pembrolizumab treatment if the treatment output includes at least one of a positive response classification for the pembrolizumab treatment or an identification of the pembrolizumab treatment as a recommended treatment.
      78. The method of embodiment 77A, wherein the pembrolizumab treatment is administered at a dosage of 200 mg every 3 weeks.
      79. The method of embodiment 77A, wherein the pembrolizumab treatment is administered at a dosage of 2 mg/kg mg every 3 weeks.
      80. The method of embodiment 77A, wherein the pembrolizumab treatment is administered at a dosage of 400 mg every 3 weeks.
      81. The method of any one of embodiments 77A-80A, wherein the pembrolizumab treatment is administered via an intravenous route of administration.
      82. The method of any one of embodiment 77A-81A, wherein the pembrolizumab treatment is administered every three weeks for four doses.
      83. A method of identifying patients with melanoma for treatment with a combination treatment comprising nivolumab and ipilimumab, the method comprising:
   [0684] receiving peptide structure data corresponding to a set of glycoproteins in a biological sample obtained from the subject;
   [0685] computing a treatment score using quantification data identified from the peptide structure data for a set of peptide structures, wherein the set of peptide structures includes at least one peptide structure identified from a plurality of peptide structures listed in Table 1, Table 12, Table 14, or Table 16; and
   [0686] generating a treatment output using the treatment score,
   [0687] wherein the patient is treated with the combination treatment if the treatment output includes at least one of a positive response classification for the combination treatment or an identification of the combination treatment as a recommended treatment.
      84. The method of embodiment 83A, wherein the combination treatment is administered at a dosage of 1 mg/kg of nivolumab combined with 3 mg/kg of ipilimumab.
      85. The method of embodiment 83a, wherein the combination treatment is administered at a dosage of 3 mg/kg of nivolumab combined with 1 mg/kg of ipilimumab.
      86. The method of any one of embodiments 83A-85A, wherein the combination treatment is administered via an intravenous route of administration.
      87. The method of any one of embodiments 83A-86A, wherein the combination treatment is administered every three weeks for four doses.
      88. A method for analyzing a set of peptide structures in a sample from a patient, the method comprising:
   [0688] (a) obtaining the sample from the patient;
      [0689] (b) preparing the sample to form a prepared sample comprising a set of peptide structures;
      [0690] (c) inputting the prepared sample into a reaction monitoring mass spectrometry system to detect a set of product ions associated with each peptide structure of the set of peptide structures,
         [0691] wherein the set of peptide structures includes at least one peptide structure selected from peptide structures PS-1 to PS-38 identified in Table 6;
         [0692] wherein the set of peptide structures includes a peptide structure that is characterized as having:
            [0693] (i) a precursor ion with a mass-charge (m/z) ratio within ±1.5 of the m/z ratio listed for the precursor ion in Table 6 as corresponding to the peptide structure; and
            [0694] (ii) a product ion having an m/z ratio within ±1.0 of the m/z ratio listed for the first product ion in Table 6 as corresponding to the peptide structure; and
      [0695] (d) generating quantification data for the set of product ions using the reaction monitoring mass spectrometry system.
         89. The method of embodiment 88A, wherein the mass-charge (m/z) ratio of the precursor ion is within ±1.0 of the m/z ratio listed for the precursor ion in Table 6 as corresponding to the peptide structure.
         90. The method of embodiment 88A, wherein the mass-charge (m/z) ratio of the precursor ion is within ±0.5 of the m/z ratio listed for the precursor ion in Table 6 as corresponding to the peptide structure.
         91. The method of any one of embodiments 88A-90A, wherein the mass-charge (m/z) ratio of the product ion is within ±0.8 of the m/z ratio listed for the precursor ion in Table 6 as corresponding to the peptide structure.
         92. The method of any one of embodiments 88A-90A, wherein the mass-charge (m/z) ratio of the product ion is within ±0.5 of the m/z ratio listed for the precursor ion in Table 6 as corresponding to the peptide structure.
         93. The method of any one of embodiments 88A-92A, further comprising:
   [0696] generating a treatment output using the quantification data to treat a subject diagnosed with a melanoma condition.
      94. The method of any one of embodiments 88A-93A, wherein the reaction monitoring mass spectrometry system uses at least one of multiple reaction monitoring mass spectrometry (MRM-MS), or selected reaction monitoring mass spectrometry (SRM-MS) to detect the set of product ions and generate the quantification data.
      95. The method of any one of embodiments 88A-94A, wherein the sample comprises a plasma sample.
      96. The method of any one of embodiments 88A-94A, wherein the sample comprises a serum sample.
      97. The method of any one of embodiments 88A-96A, wherein preparing the sample comprises at least one of:
   [0697] denaturing one or more proteins in the sample to form one or more denatured proteins;
   [0698] reducing the one or more denatured proteins in the sample to form one or more reduced proteins;
   [0699] alkylating the one or more proteins in the sample using an alkylating agent to prevent reformation of disulfide bonds in the one or more reduced proteins to form one or more alkylated proteins; or
   [0700] digesting the one or more alkylated proteins in the sample using a proteolysis catalyst to form the prepared sample comprising the set of peptide structures.
      98. A composition comprising at least one of peptide structures identified in Table 1, Table 12, Table 14, or Table 16.
      99. A composition comprising a peptide structure or a product ion, wherein:
   [0701] the peptide structure or product ion comprises the amino acid sequence having at least 90% sequence identity to any one of SEQ ID NOS: 21-46, 101-131, and 159-257; and
   [0702] the product ion is selected as one from a group consisting of product ions identified in Table 6, 18, or 20 including product ions falling within an identified m/z range.
      100. A composition comprising a glycopeptide structure selected as one from a group consisting of peptide structures PS-1 to PS-38 identified in Table 6, peptide structures from Table 18, or peptide structures from Table 20, wherein:
   [0703] the glycopeptide structure comprises:
      [0704] an amino acid peptide sequence identified in Table 5 as corresponding to the glycopeptide structure; and
      [0705] a glycan structure identified in Table 1 as corresponding to the glycopeptide structure in which the glycan structure is linked to a residue of the amino acid peptide sequence at a corresponding position identified in Table 1; and
         [0706] wherein the glycan structure has a glycan composition.
            101. The composition of embodiment 100A, wherein the glycan composition is identified in Table 7.
            102. The composition of embodiment 100A or embodiment 101A, wherein:
   [0707] the glycopeptide structure has a precursor ion having a charge identified in Table 6, Table 18, or Table 20 as corresponding to the glycopeptide structure.
      103. The composition of any one of embodiments 100A-101A, wherein:
   [0708] the glycopeptide structure has a precursor ion with an m/z ratio within ±1.5 of the m/z ratio listed for the precursor ion in Table 6, Table 18, or Table 20 as corresponding to the glycopeptide structure.
      104. The composition of any one of embodiments 100A-101A, wherein:
   [0709] the glycopeptide structure has a precursor ion with an m/z ratio within ±1.0 of the m/z ratio listed for the precursor ion in Table 6, Table 18, or Table 20 as corresponding to the glycopeptide structure.
      105. The composition of any one of embodiments 100A-101A, wherein:
   [0710] the glycopeptide structure has a precursor ion with an m/z ratio within ±0.5 of the m/z ratio listed for the precursor ion in Table 6, Table 18, or Table 20 as corresponding to the glycopeptide structure.
      106. The composition of any one of embodiments 100A-105A, wherein:
   [0711] the glycopeptide structure has a product ion with an m/z ratio within ±1.0 of the m/z ratio listed for the first product ion in Table 6, Table 18, or Table 20 as corresponding to the glycopeptide structure.
      107. The composition of any one of embodiments 100A-105A, wherein:
   [0712] the glycopeptide structure has a product ion with an m/z ratio within ±0.8 of the m/z ratio listed for the first product ion in Table 6, Table 18, or Table 20 as corresponding to the glycopeptide structure.
      108. The composition of any one of embodiments 100A-105A, wherein:
   [0713] the glycopeptide structure has a product ion with an m/z ratio within ±0.5 of the m/z ratio listed for the first product ion in Table 6 as corresponding to the glycopeptide structure.
      109. The composition of any one of embodiments 100A-108A, wherein the glycopeptide structure has a monoisotopic mass identified in Table 1 as corresponding to the glycopeptide structure.
      110. A composition comprising a peptide structure selected as one from a plurality of peptide structures identified in Table 1, wherein:
   [0714] the peptide structure has a monoisotopic mass identified as corresponding to the peptide structure in Table 1; and
   [0715] the peptide structure comprises the amino acid sequence of SEQ ID NOs: 21-46 as corresponding to the peptide structure.
      111. The composition of embodiment 110A, wherein:
   [0716] the peptide structure has a precursor ion having a charge identified in Table 6 as corresponding to the peptide structure.
      112. The composition of embodiment 110A, wherein:
   [0717] the peptide structure has a precursor ion with an m/z ratio within ±1.5 of the m/z ratio listed for the precursor ion in Table 6 as corresponding to the peptide structure.
      113. The composition of embodiment 110A, wherein:
   [0718] the peptide structure has a precursor ion with an m/z ratio within ±1.0 of the m/z ratio listed for the precursor ion in Table 6 as corresponding to the peptide structure.
      114. The composition of embodiment 110A, wherein:
   [0719] the peptide structure has a precursor ion with an m/z ratio within ±0.5 of the m/z ratio listed for the precursor ion in Table 6 as corresponding to the peptide structure.
      115. The composition of any one of embodiments 110A-114A, wherein:
   [0720] the peptide structure has a product ion with an m/z ratio within ±1.0 of the m/z ratio listed for the first product ion in Table 6 as corresponding to the peptide structure.
      116. The composition of any one of embodiments 110A-114A, wherein:
   [0721] the peptide structure has a product ion with an m/z ratio within ±0.8 of the m/z ratio listed for the first product ion in Table 6 as corresponding to the peptide structure.
      117. The composition of any one of embodiments 110A-114A, wherein:
   [0722] the peptide structure has a product ion with an m/z ratio within ±0.5 of the m/z ratio listed for the first product ion in Table 6 as corresponding to the peptide structure.
      118. A kit comprising at least one agent for quantifying at least one peptide structure identified in Table 1, Table 12, Table 14, or Table 16 to carry out at least a portion of the method of any one of claims 1-87.
      119. A kit comprising at least one of a glycopeptide standard, a buffer, or a set of peptide sequences to carry out at least a portion of the method of any one of claims 1-87, a peptide sequence of the set of peptide sequences identified by a corresponding one of SEQ ID NOS: 21-46, 101-131, 159-207, or 300-429.
      120. A system comprising:
[0723] one or more data processors; and
   [0724] a non-transitory computer readable storage medium containing instructions which, when executed on the one or more data processors, cause the one or more data processors to perform part or all of any one of claims 1-87.
      121. A computer-program product tangibly embodied in a non-transitory machine-readable storage medium, including instructions configured to cause one or more data processors to perform part or all of any one of embodiments 1A-87A.
      122. The method of any one of embodiments 1A-82A, wherein the subject has melanoma and wherein the set of peptide structures comprises at least one peptide structure from table 12.
      123. The method of embodiment 122A, wherein the set of peptide structures comprises at least two, at least three, at least 4, at least 5, at least 6, at least 7, at least 8, at least 9, at least 10, at least 15 or at least 20 peptide structures from table 12.
      124. The method of embodiment 122A or 123A, wherein the subject has advanced melanoma and/or malignant melanoma.
      125. The method any one of embodiments 1A-87A, wherein the subject has non-small cell lung cancer, and wherein the set of peptide structures comprises at least one peptide structure from table 14.
      126. The method of embodiment 125A, wherein the set of peptide structures comprises at least two, at least three, at least 4, at least 5, at least 6, at least 7, at least 8, at least 9, at least 10, at least 15 or at least 20 peptide structures from table 14.
      127. The method any one of embodiments 1A-87A, wherein the subject has non-small cell lung cancer, and wherein the set of peptide structures comprises at least one peptide structure from table 16.
      128. The method of embodiment 125A, wherein the set of peptide structures comprises at least two, at least three, at least 4, at least 5, at least 6, at least 7, at least 8, at least 9, at least 10, at least 15 or at least 20 peptide structures from table 16.
      129. The method of any one of embodiments 27A-28A, wherein if the treatment output indicates that the subject is not likely to respond to pembrolizumab or nivolumab and ipilimumab, the recommended treatment plan comprises an alternative therapy selected from the group consisting of standard non-checkpoint immunotherapy, standard chemotherapy, combination chemotherapy and non-checkpoint immunotherapy, targeted therapy, radiation therapy, a new generation checkpoint inhibitor alone or in combination, a LAG-3 inhibitor, a recommend for participation in a clinical trial for an oncotherapeutic, laser therapy or photodynamic therapy.
      130. The method of any one of embodiments 27A-28A, wherein if the treatment output indicates that the subject is not likely to respond to pembrolizumab or nivolumab and ipilimumab, further comprising administering an alternative therapy selected from the group consisting of standard non-checkpoint immunotherapy, standard chemotherapy, combination chemotherapy and non-checkpoint immunotherapy, targeted therapy, radiation therapy, a new generation checkpoint inhibitor alone or in combination, a LAG-3 inhibitor, a recommend for participation in a clinical trial for an oncotherapeutic, laser therapy or photodynamic therapy.
      131. The method of any one of embodiments 27A-28A, wherein the subject has melanoma, and wherein if the treatment output indicates that the subject is not likely to respond to pembrolizumab or nivolumab and ipilimumab, the recommended treatment plan comprises an alternative therapy selected from the group consisting of other immunotherapy, injection of T-VEC (talimogene laherparepvec) vaccine, Bacille Clamette-Guerin vaccine, imiquimod cream, IL-2 immunotherapy, chemotherapy, dacarbazine and temozolomide either alone or in combination with other drugs, combination of BRAF inhibitor and MEK inhibitor for subjects with BRAF gene change, imatinib or nilotinib for subjects with changes to c-KIT gene, and radiation therapy.
      132. The method of any one of embodiments 27A-28A, wherein the subject has melanoma, and wherein if the treatment output indicates that the subject is not likely to respond to pembrolizumab or nivolumab and ipilimumab, further comprising administering an alternative therapy selected from the group consisting of other immunotherapy, injection of T-VEC (talimogene laherparepvec) vaccine, Bacille Clamette-Guerin vaccine, imiquimod cream, IL-2 immunotherapy, chemotherapy, dacarbazine and temozolomide either alone or in combination with other drugs, combination of BRAF inhibitor and MEK inhibitor for subjects with BRAF gene change, imatinib or nilotinib for subjects with changes to c-KIT gene, and radiation therapy.
      133. The method of any one of embodiments 27A-28A, wherein the subject has non-small cell lung cancer, and wherein if the treatment output indicates that the subject is not likely to respond to nivolumab and ipilimumab, the recommended treatment plan comprises an alternative therapy selected from the group consisting of adjuvant treatment with osimertinib for subject with EGFR mutations, targeted therapy for patients with certain gene mutations such as anti-angiogenic agents, drugs that target cells with KRAS gene changes, drugs that target cells with EGFR changes, drugs that target cells with ALK gene changes, drugs that target cells with ROS1 gene changes, drugs that target cells with BRAF gene changes, chemotherapy, cisplatin, carboplatin, paclitaxel, albumin-bound paclitaxel, docetaxel, gemcitabine, vinorelbine, etoposide, pemetrexed, chemotherapy combined with radiation therapy (chemoradiation) and chemoradiation followed by durvalumab.
      134. The method of any one of embodiments 27A-28A, wherein the subject has non-small cell lung cancer, and wherein if the treatment output indicates that the subject is not likely to respond to nivolumab and ipilimumab, administering an alternative therapy selected from the group consisting of adjuvant treatment with osimertinib for subject with EGFR mutations, targeted therapy for patients with certain gene mutations such as anti-angiogenic agents, drugs that target cells with KRAS gene changes, drugs that target cells with EGFR changes, drugs that target cells with ALK gene changes, drugs that target cells with ROS1 gene changes, drugs that target cells with BRAF gene changes, chemotherapy, cisplatin, carboplatin, paclitaxel, albumin-bound paclitaxel, docetaxel, gemcitabine, vinorelbine, etoposide, pemetrexed, chemotherapy combined with radiation therapy (chemoradiation) and chemoradiation followed by durvalumab.
      135. The method of any one of embodiments 129A-134A, wherein the alternative therapy is a first-line therapy.
      136. The method of any one of embodiments 129A-134A, wherein the subject has received a first-line therapy, wherein the alternative therapy is a second-line therapy, and wherein the alternative therapy is different from the first-line therapy.
      137. The method of any one of embodiments 8A-26A, wherein the recommendation for modifying the existing treatment plan comprises selecting a different treatment for the subject selected from the group consisting of standard non-checkpoint immunotherapy, standard chemotherapy, combination chemotherapy and non-checkpoint immunotherapy, targeted therapy, radiation therapy, a new generation checkpoint inhibitor alone or in combination, a LAG-3 inhibitor, a recommend for participation in a clinical trial for an oncotherapeutic, laser therapy or photodynamic therapy.
      138. The method of any one of embodiments 8A-26A, wherein the subject has melanoma, and wherein the recommendation for modifying the existing treatment plan comprises selecting a different treatment for the subject selected from the group consisting of other immunotherapy, injection of T-VEC (talimogene laherparepvec) vaccine, Bacille Clamette-Guerin vaccine, imiquimod cream, IL-2 immunotherapy, chemotherapy, dacarbazine and temozolomide either alone or in combination with other drugs, combination of BRAF inhibitor and MEK inhibitor for subjects with BRAF gene change, imatinib or nilotinib for subjects with changes to c-KIT gene, and radiation therapy.
      139. The method of any one of embodiments 8A-26A, wherein the subject has non-small cell lung cancer and wherein the recommendation for modifying the existing treatment plan comprises selecting a different treatment for the subject selected from the group consisting of adjuvant treatment with osimertinib for subject with EGFR mutations, targeted therapy for patients with certain gene mutations such as anti-angiogenic agents, drugs that target cells with KRAS gene changes, drugs that target cells with EGFR changes, drugs that target cells with ALK gene changes, drugs that target cells with ROS1 gene changes, drugs that target cells with BRAF gene changes, chemotherapy, cisplatin, carboplatin, paclitaxel, albumin-bound paclitaxel, docetaxel, gemcitabine, vinorelbine, etoposide, pemetrexed, chemotherapy combined with radiation therapy (chemoradiation) and chemoradiation followed by durvalumab.
      140. The method of any one of embodiment 137A-139A, further comprising administering the selected different treatment.
      141. The method of embodiment 136A or embodiment 137A, wherein the subject has received a previous therapy and wherein the recommendation for modifying the existing treatment plan comprises selecting a therapy other than the previous therapy.
      142. A method for identifying a subject that is unlikely to respond to treatment with pembrolizumab or nivolumab and ipilimumab comprising
   [0725] receiving peptide structure data corresponding to a set of glycoproteins in a biological sample obtained from the subject;
   [0726] computing a treatment score using quantification data identified from the peptide structure data for a set of peptide structures, wherein the set of peptide structures includes at least one peptide structure identified from a plurality of peptide structures listed in Table 7, Table 12, Table 14, or Table 16;
   [0727] generating a treatment output that indicates a predicted response to the pembrolizumab or nivolumab and ipilimumab for the subject using the treatment score.
      143. The method of embodiment 142A, wherein generating the treatment output comprises: generating the predicted response to the treatment based on whether the treatment score is above a selected threshold.
      144. The method of embodiment 143A, wherein if predicted response to treatment indicates that the subject is unlikely to respond to treatment with pembrolizumab or nivolumab and ipilimumab, the subject is administered other immunotherapy, injection of T-VEC (talimogene laherparepvec) vaccine, Bacille Clamette-Guerin vaccine, imiquimod cream, IL-2 immunotherapy, chemotherapy, dacarbazine and temozolomide either alone or in combination with other drugs, combination of BRAF inhibitor and MEK inhibitor for subjects with BRAF gene change, imatinib or nilotinib for subjects with changes to c-KIT gene, radiation therapy, osimertinib for subject with EGFR mutations, targeted therapy for patients with certain gene mutations such as anti-angiogenic agents, drugs that target cells with KRAS gene changes, drugs that target cells with EGFR changes, drugs that target cells with ALK gene changes, drugs that target cells with ROS1 gene changes, drugs that target cells with BRAF gene changes, chemotherapy, cisplatin, carboplatin, paclitaxel, albumin-bound paclitaxel, docetaxel, gemcitabine, vinorelbine, etoposide, pemetrexed, chemotherapy combined with radiation therapy (chemoradiation) and chemoradiation followed by durvalumab, non-checkpoint immunotherapy, standard chemotherapy, combination chemotherapy and non-checkpoint immunotherapy, targeted therapy, radiation therapy, a new generation checkpoint inhibitor alone or in combination, a LAG-3 inhibitor, a recommend for participation in a clinical trial for an oncotherapeutic, laser therapy and photodynamic therapy.

What is claimed is:

1. A method for managing a treatment for a subject diagnosed with a melanoma or non-small cell lung cancer condition, the method comprising:
receiving peptide structure data corresponding to a set of glycoproteins in a biological sample obtained from the subject;
computing a treatment score using quantification data identified from the peptide structure data for a set of peptide structures, wherein the set of peptide structures includes at least one peptide structure identified from a plurality of peptide structures listed in Table 1, Table 12, Table 14, or Table 16; and
generating a treatment output that indicates a predicted response to the treatment for the subject using the treatment score.

2. The method of claim 1, wherein generating the treatment output comprises:
generating the predicted response to the treatment based on whether the treatment score is above a selected threshold.

3. (canceled)

4. The method of claim 2, wherein the generating the predicted response comprises:
identifying a first predicted response classification for the subject when the treatment score is above 0.5; and
identifying a second predicted response classification for the subject when the treatment score is not above 0.5.

5. The method of claim 4, wherein the first predicted response classification is sustained control and wherein the second predicted response classification is early disruption.

6. The method of claim 1, wherein the treatment is pembrolizumab and wherein the set of peptide structures includes at least one peptide structure identified from a plurality of peptide structures listed in Table 2.

7. The method of claim 1, wherein the condition is melanoma and the treatment comprises a combination of nivolumab and ipilimumab and wherein the set of peptide structures includes at least one peptide structure identified from a plurality of peptide structures listed in Table 3.

8. The method of claim 1, wherein the treatment outcome comprises a recommendation to modify a treatment plan for the subject.

9. (canceled)

10. The method of claim 1, wherein computing the treatment score comprises:
computing a proportion of the set of peptide structures having a selected abundance greater than a reference abundance.

11. The method of claim 10, wherein the reference abundance for a peptide structure of the set of peptide structures is a median of a plurality of abundances for the peptide structure across a sample population and wherein the selected abundance for a glycopeptide structure of the set of peptide structures is a relative abundance and the selected abundance for an aglycosylated peptide structure of the set of peptide structures is an absolute abundance.

12. The method of claim 1, further comprising:
identifying the set of peptide structures using sample data and a statistical algorithm that identifies a relative significance for each peptide structure of a collection of peptide structures corresponding to the sample data.

13.-15. (canceled)

16. The method of claim 14, wherein:
the first response classification is sustained control which indicates an absence of disruption events during a sustained period of time after treatment administration;
the second response classification is early disruption which indicates a presence of at least one disruption event during an initial period of time after treatment; and
the sustained period of time is longer than the initial period of time.

17. (canceled)

18. The method of claim 1, wherein the at least one peptide structure comprises a glycopeptide structure defined by a peptide sequence and a glycan structure linked to the peptide sequence at a linking site of the peptide sequence, as identified in Table 1, with the peptide sequence being one of SEQ ID NOS: 21-46 as defined in Table 7.

19. The method of claim 1, wherein the quantification data for a peptide structure of the set of peptide structures comprises at least one of an adjusted abundance, a relative abundance, an absolute abundance, a normalized abundance, a relative quantity, an adjusted quantity, a normalized quantity, a relative concentration, an adjusted concentration, or a normalized concentration.

20. The method of claim 1, wherein the peptide structure data is generated using multiple reaction monitoring mass spectrometry (MRM-MS).

21. The method of claim 1, further comprising:
creating a sample from the biological sample; and
preparing the sample using reduction, alkylation, and enzymatic digestion to form a prepared sample that includes a set of peptide structures.

22. (canceled)

23. The method of claim 1, wherein the treatment output comprises at least one of a design for the treatment or a therapeutic dosage for the treatment.

24. (canceled)

25. The method of claim 1, further comprising:
administering a therapeutic dosage of the treatment based on the predicted response being a predicted response classification that indicates the treatment will be successful.

26. The method of claim 1, further comprising:
administering a therapeutic dosage of the treatment based on the predicted response being sustained control.

27.-57. (canceled)

58. A method for treating a subject diagnosed with a melanoma or non-small cell lung cancer condition, comprising:
receiving peptide structure data corresponding to a set of glycoproteins in a biological sample obtained from the subject;
computing a treatment score using quantification data identified from the peptide structure data for a set of peptide structures, wherein the set of peptide structures includes at least one peptide structure identified from a plurality of peptide structures listed in Table 1, Table 12, Table 14, or Table 16;
generating a treatment output that indicates a predicted response to a treatment for the subject using the treatment score; and
administering the treatment to the patient in response to the predicted response includes a positive response classification, the step of administering comprising at least one of intravenous or oral administration of the recommended treatment or a derivative thereof at a therapeutic dosage,
wherein the treatment is selected as one from a group consisting of:
a first treatment of pembrolizumab for which the therapeutic dosage of at least one of 200 mg every three weeks, 2 mg/kg every three weeks is administered, or 400 mg every 6 weeks; and
a second treatment comprised of nivolumab and ipilimumab for which the therapeutic dosage of either 1 mg/kg nivolumab with 3 mg/kg ipilimumab or 3 mg/kg nivolumab with 1 mg/kg ipilimumab is administered.

59.-65. (canceled)

66. A method of treating melanoma or non-small cell lung cancer in a subject, the method comprising:
receiving peptide structure data corresponding to a set of glycoproteins in a biological sample obtained from the subject;
computing a treatment score using quantification data identified from the peptide structure data for a set of peptide structures, wherein the set of peptide structures includes at least one peptide structure identified from a plurality of peptide structures listed in Table 1, Table 12, Table 14, or Table 16;
generating a treatment output using the treatment score; and
administering a pembrolizumab treatment to the subject if the treatment output includes at least one of a positive response classification for the pembrolizumab treatment or an identification of the pembrolizumab treatment as a recommended treatment.

67.-71. (canceled)

72. A method of treating melanoma or non-small cell lung cancer in a subject, the method comprising:
receiving peptide structure data corresponding to a set of glycoproteins in a biological sample obtained from the subject;
computing a treatment score using quantification data identified from the peptide structure data for a set of peptide structures, wherein the set of peptide structures includes at least one peptide structure identified from a plurality of peptide structures listed in Table 1, Table 12, Table 14, or Table 16;
generating a treatment output using the treatment score; and
administering a combination treatment comprising a combination of nivolumab and ipilimumab to the subject if the treatment output includes at least one of a positive response classification for the combination treatment or an identification of the combination treatment as a recommended treatment.

73.-76. (canceled)

77. A method of identifying patients with melanoma or non-small cell lung cancer for treatment with a pembrolizumab treatment, the method comprising:
receiving peptide structure data corresponding to a set of glycoproteins in a biological sample obtained from the subject;
computing a treatment score using quantification data identified from the peptide structure data for a set of peptide structures, wherein the set of peptide structures includes at least one peptide structure identified from a plurality of peptide structures listed in Table 1, Table 12, Table 14, or Table 16; and
generating a treatment output using the treatment score,
wherein the patient is treated with the pembrolizumab treatment if the treatment output includes at least one of a positive response classification for the pembrolizumab treatment or an identification of the pembrolizumab treatment as a recommended treatment.

78.-82. (canceled)

83. A method of identifying patients with melanoma for treatment with a combination treatment comprising nivolumab and ipilimumab, the method comprising:
receiving peptide structure data corresponding to a set of glycoproteins in a biological sample obtained from the subject;
computing a treatment score using quantification data identified from the peptide structure data for a set of peptide structures, wherein the set of peptide structures includes at least one peptide structure identified from a plurality of peptide structures listed in Table 1, Table 12, Table 14, or Table 16; and
generating a treatment output using the treatment score,
wherein the patient is treated with the combination treatment if the treatment output includes at least one of a positive response classification for the combination treatment or an identification of the combination treatment as a recommended treatment.

84.-87. (canceled)

88. A method for analyzing a set of peptide structures in a sample from a patient, the method comprising:
(a) obtaining the sample from the patient;
(b) preparing the sample to form a prepared sample comprising a set of peptide structures;
(c) inputting the prepared sample into a reaction monitoring mass spectrometry system to detect a set of product ions associated with each peptide structure of the set of peptide structures,
wherein the set of peptide structures includes at least one peptide structure selected from peptide structures PS-1 to PS-38 identified in Table 6;
wherein the set of peptide structures includes a peptide structure that is characterized as having:
(i) a precursor ion with a mass-charge (m/z) ratio within ±1.5 of the m/z ratio listed for the precursor ion in Table 6 as corresponding to the peptide structure; and
(ii) a product ion having an m/z ratio within ±1.0 of the m/z ratio listed for the first product ion in Table 6 as corresponding to the peptide structure; and
(d) generating quantification data for the set of product ions using the reaction monitoring mass spectrometry system.

89.-144. (canceled)

The application's sequence listing, which the Patent Office published only in electronic form, follows.

SEQUENCE LISTING (470 sequences)

SEQ ID NO: 1 - protein, 330 aa, Homo sapiens [sequence omitted]

SEQ ID NO: 2 - protein, 326 aa, Homo sapiens
ASTKGPSVFPLAPCSRSTSESTAALGCLVKDYFPEPVTVSWNSGALTSGVHTFPAVLQSSGLYSLSSVVTVPSSNFGTQTYTCNVDHKPSNTKVDKTVERKCCVECPPCPAPPVAGPSVFLFPPKPKDTLMISRTPEVTCVVVDVSHEDPEVQFNWYVDGVEVHNAKTKPREEQFNSTFRVVSVLTVVHQDWLNGKEYKCKVSNKGLPAPIEKTISKTKGQPREPQVYTLPPSREEMTKNQVSLTCLVKGFYPSDISVEWESNGQPENNYKTTPPMLDSDGSFFLYSKLTVDKSRWQQGNVFSCSVMHEALHNHYTQKSLSLSPGK

SEQ ID NO: 3 - protein, 415 aa, Homo sapiens
MSPFLYLVLLVLGLHATIHCASPEGKVTACHSSQPNATLYKMSSINADFAFNLYRRFTVETPDKNIFFSPVSISAALVMLSFGACCSTQTEIVETLGFNLTDTPMVEIQHGFQHLICSLNFPKKELELQIGNALFIGKHLKPLAKFLNDVKTLYETEVFSTDFSNISAAKQEINSHVEMQTKGKVVGLIQDLKPNTIMVLVNYIHFKAQWANPFDPSKTEDSSSFLIDKTTTVQVPMMHQMEQYYHLVDMELNCTVLQMDYSKNALALFVLPKEGQMESVEAAMSSKTLKKWNRLLQKGWVDLFVPKFSISATYDLGATLLKMGIQHAYSENADFSGLTEDNGLKLSNAAHKAVLHIGEKGTEAAAVPEVELSDQPENTFLHPIIQIDRSFMLLILERSTRSILFLGKVVNPTEA

SEQ ID NO: 4 - protein, 201 aa, Homo sapiens
MALSWVLTVLSLLPLLEAQIPLCANLVPVPITNATLDRITGKWFYIASAFRNEEYNKSVQEIQATFFYFTPNKTEDTIFLREYQTRQDQCIYNTTYLNVQRENGTISRYVGGQEHFAHLLILRDTKTYMLAFDVNDEKNWGLSVYADKPETTKEQLGEFYEALDCLRIPKSDVVYTDWKKDKCEPLEKQHEKERKQEEGES

SEQ ID NO: 5 - protein, 591 aa, Homo sapiens
MKNSRTWAWRAPVELFLLCAALGCLSLPGSRGERPHSFGSNAVNKSFAKSRQMRSVDVTLMPIDCELSSWSSWTTCDPCQKKRYRYAYLLQPSQFHGEPCNFSDKEVEDCVTNRPCRSQVRCEGFVCAQTGRCVNRRLLCNGDNDCGDQSDEANCRRIYKKCQHEMDQYWGIGSLASGINLFTNSFEGPVLDHRYYAGGCSPHYILNTRFRKPYNVESYTPQTQGKYEFILKEYESYSDFERNVTEKMASKSGFSFGFKIPGIFELGISSQSDRGKHYIRRTKRFSHTKSVFLHARSDLEVAHYKLKPRSLMLHYEFLQRVKRLPLEYSYGEYRDLFRDFGTHYITEAVLGGIYEYTLVMNKEAMERGDYTLNNVHACAKNDFKIGGAIEEVYVSLGVSVGKCRGILNEIKDRNKRDTMVEDLVVLVRGGASEHITTLAYQELPTADLMQEWGDAVQYNPAIIKVKVEPLYELVTATDFAYSSTVRQNMKQALEEFQKEVSSCHCAPCQGNGVPVLKGSRCDCICPVGSQGLACEVSYRKNTPIDGKWNCWSNWSSCSGRRKTRQRQCNNPPPQNGGSPCSGPASETLDCS

SEQ ID NO: 6 - protein, 353 aa, Homo sapiens
ASPTSPKVFPLSLCSTQPDGNVVIACLVQGFFPQEPLSVTWSESGQGVTARNFPPSQDASGDLYTTSSQLTLPATQCLAGKSVTCHVKHYTNPSQDVTVPCPVPSTPPTPSPSTPPTPSPSCCHPRLSLHRPALEDLLLGSEANLTCTLTGLRDASGVTFTWTPSSGKSAVQGPPERDLCGCYSVSSVLPGCAEPWNHGKTFTCTAAYPESKTPLTATLSKSGNTFRPEVHLLPPPSEELALNELVTLTCLARGFSPKDVLVRWLQGSQELPREKYLTWASRQEPSQGTTTFAVTSILRVAAEDWKKGDTFSCMVGHEALPLAFTQKTIDRLAGKPTHVNVSVVMAEVDGTCY

SEQ ID NO: 7 - protein, 638 aa, Homo sapiens
MILFKQATYFISLFATVSCGCLTQLYENAFFRGGDVASMYTPNAQYCQMRCTFHPRCLLFSFLPASSINDMEKRFGCFLKDSVTGTLPKVHRTGAVSGHSLKQCGHQISACHRDIYKGVDMRGVNFNVSKVSSVEECQKRCTNNIRCQFFSYATQTFHKAEYRNNCLLKYSPGGTPTAIKVLSNVESGFSLKPCALSEIGCHMNIFQHLAFSDVDVARVLTPDAFVCRTICTYHPNCLFFTFYTNVWKIESQRNVCLLKTSESGTPSSSTPQENTISGYSLLTCKRTLPEPCHSKIYPGVDFGGEELNVTFVKGVNVCQETCTKMIRCQFFTYSLLPEDCKEEKCKCFLRLSMDGSPTRIAYGTQGSSGYSLRLCNTGDNSVCTTKTSTRIVGGTNSSWGEWPWQVSLQVKLTAQRHLCGGSLIGHQWVLTAAHCFDGLPLQDVWRIYSGILNLSDITKDTPFSQIKEIIIHQNYKVSEGNHDIALIKLQAPLNYTEFQKPICLPSKGDTSTIYTNCWVTGWGFSKEKGEIQNILQKVNIPLVTNEECQKRYQDYKITQRMVCAGYKEGGKDACKGDSGGPLVCKHNGMWRLVGITSWGEGCARREQPGVYTKVAEYMDWILEKTQSSDGKAQMQSPA

SEQ ID NO: 8 - protein, 423 aa, Homo sapiens
MERMLPLLALGLLAAGFCPAVLCHPNSPLDEENLTQENQDRGTHVDLGLASANVDFAFSLYKQLVLKAPDKNVIFSPLSISTALAFLSLGAHNTTLTEILKGLKFNLTETSEAEIHQSFQHLLRTLNQSSDELQLSMGNAMFVKEQLSLLDRFTEDAKRLYGSEAFATDFQDSAAAKKLINDYVKNGTRGKITDLIKDLDSQTMMVLVNYIFFKAKWEMPFDPQDTHQSRFYLSKKKWVMVPMMSLHHLTIPYFRDEELSCTVVELKYTGNASALFILPDQDKMEEVEAMLLPETLKRWRDSLEFREIGELYLPKFSISRDYNLNDILLQLGIEEAFTSKADLSGITGARNLAVSQVVHKAVLDVFEEGTEASAATAVKITLLSALVETRTIVRFNRPFLMIIVPTDTQNIFFMSKVTNPKQA

SEQ ID NO: 9 - protein, 367 aa, Homo sapiens
MKSLVLLLCLAQLWGCHSAPHGPGLIYRQPNCDDPETEEAALVAIDYINQNLPWGYKHTLNQIDEVKVWPQQPSGELFEIEIDTLETTCHVLDPTPVARCSVRQLKEHAVEGDCDFQLLKLDGKFSVVYAKCDSSPDSAEDVRKVCQDCPLLAPLNDTRVVHAAKAALAAFNAQNNGSNFQLEEISRAQLVPLPPSTYVEFTVSGTDCVAKEATEAAKCNLLAEKQYGFCKATLSEKLGGAEVAVTCMVFQTQPVSSQPQPEGANEAVPTPVVDPDAPPSPPLGAPGLPPAGSPPDSHVLLAAPPGHQLHRAHYDLRHTFMGVVSLGSPSGEVSHPRKTRTVVQPSVGAAAGPVVPPCPGRIRHFKV

SEQ ID NO: 10 - protein, 449 aa, Homo sapiens
MMKTLLLFVGLLLTWESGQVLGDQTVSDNELQEMSNQGSKYVNKEIQNAVNGVKQIKTLIEKTNEERKTLLSNLEEAKKKKEDALNETRESETKLKELPGVCNETMMALWEECKPCLKQTCMKFYARVCRSGSGLVGRQLEEFLNQSSPFYFWMNGDRIDSLLENDRQQTHMLDVMQDHFSRASSIIDELFQDRFFTREPQDTYHYLPFSLPHRRPHFFFPKSRIVRSLMPFSPYEPLNFHAMFQPFLEMIHEAQQAMDIHFHSPAFQHPPTEFIREGDDDRTVCREIRHNSTGCLRMKDQCDKCREILSVDCSTNNPSQAKLRRELDESLQVAERLTRKYNELLKSYQWKMLNTSSLLEQLNEQFNWVSRLANLTQGEDQYYLRVTTVASHTSDSDVPSGVTEVVVKLFDSDPITVTVPVEVSRKNPKFMETVAEKALQEYRKKHREE

SEQ ID NO: 11 - protein, 1474 aa, Homo sapiens
MGKNKLLHPSLVLLLLVLLPTDASVSGKPQYMVLVPSLLHTETTEKGCVLLSYLNETVTVSASLESVRGNRSLFTDLEAENDVLHCVAFAVPKSSSNEEVMFLTVQVKGPTQEFKKRTTVMVKNEDSLVFVQTDKSIYKPGQTVKFRVVSMDENFHPLNELIPLVYIQDPKGNRIAQWQSFQLEGGLKQFSFPLSSEPFQGSYKVVVQKKSGGRTEHPFTVEEFVLPKFEVQVTVPKIITILEEEMNVSVCGLYTYGKPVPGHVTVSICRKYSDASDCHGEDSQAFCEKFSGQLNSHGCFYQQVKTKVFQLKRKEYEMKLHTEAQIQEEGTVVELTGRQSSEITRTITKLSFVKVDSHFRQGIPFFGQVRLVDGKGVPIPNKVIFIRGNEANYYSNATTDEHGLVQFSINTTNVMGTSLTVRVNYKDRSPCYGYQWVSEEHEEAHHTAYLVFSPSKSFVHLEPMSHELPCGHTQTVQAHYILNGGTLLGLKKLSFYYLIMAKGGIVRTGTHGLLVKQEDMKGHFSISIPVKSDIAPVARLLIYAVLPTGDVIGDSAKYDVENCLANKVDLSFSPSQSLPASHAHLRVTAAPQSVCALRAVDQSVLLMKPDAELSASSVYNLLPEKDLTGFPGPLNDQDNEDCINRHNVYINGITYTPVSSTNEKDMYSFLEDMGLKAFTNSKIRKPKMCPQLQQYEMHGPEGLRVGFYESDVMGRGHARLVHVEEPHTETVRKYFPETWIWDLVVVNSAGVAEVGVTVPDTITEWKAGAFCLSEDAGLGISSTASLRAFQPFFVELTMPYSVIRGEAFTLKATVLNYLPKCIRVSVQLEASPAFLAVPVEKEQAPHCICANGRQTVSWAVTPKSLGNVNFTVSAEALESQELCGTEVPSVPEHGRKDTVIKPLLVEPEGLEKETTFNSLLCPSGGEVSEELSLKLPPNVVEESARASVSVLGDILGSAMQNTQNLLQMPYGCGEQNMVLFAPNIYVLDYLNETQQLTPEIKSKAIGYLNTGYQRQLNYKHYDGSYSTFGERYGRNQGNTWLTAFVLKTFAQARAYIFIDEAHITQALIWLSQRQKDNGCFRSSGSLLNNAIKGGVEDEVTLSAYITIALLEIPLTVTHPVVRNALFCLESAWKTAQEGDHGSHVYTKALLAYAFALAGNQDKRKEVLKSLNEEAVKKDNSVHWERPQKPKAPVGHFYEPQAPSAEVEMTSYVLLAYLTAQPAPTSEDLTSATNIVKWITKQQNAQGGFSSTQDTVVALHALSKYGAATFTRTGKAAQVTIQSSGTFSSKFQVDNNNRLLLQQVSLPELPGEYSMKVTGEGCVYLQTSLKYNILPEKEEFPFALGVQTLPQTCDEPKAHTSFQISLSVSYTGSRSASNMAIVDVKMVSGFIPLKPTVKMLERSNHVSRTEVSSNHVLIYLDKVSNQTLSLFFTVLQDVPVRDLKPAIVKVYDYYETDEFAIAEYNAPCSKDLGNA

SEQ ID NO: 12 - protein, 1231 aa, Homo sapiens
MRLLAKIICLMLWAICVAEDCNELPPRRNTEILTGSWSDQTYPEGTQAIYKCRPGYRSLGNVIMVCRKGEWVALNPLRKCQKRPCGHPGDTPFGTFTLTGGNVFEYGVKAVYTCNEGYQLLGEINYRECDTDGWTNDIPICEVVKCLPVTAPENGKIVSSAMEPDREYHFGQAVRFVCNSGYKIEGDEEMHCSDDGFWSKEKPKCVEISCKSPDVINGSPISQKIIYKENERFQYKCNMGYEYSERGDAVCTESGWRPLPSCEEKSCDNPYIPNGDYSPLRIKHRTGDEITYQCRNGFYPATRGNTAKCTSTGWIPAPRCTLKPCDYPDIKHGGLYHENMRRPYFPVAVGKYYSYYCDEHFETPSGSYWDHIHCTQDGWSPAVPCLRKCYFPYLENGYNQNYGRKFVQGKSIDVACHPGYALPKAQTTVTCMENGWSPTPRCIRVKTCSKSSIDIENGFISESQYTYALKEKAKYQCKLGYVTADGETSGSITCGKDGWSAQPTCIKSCDIPVFMNARTKNDFTWFKLNDTLDYECHDGYESNTGSTTGSIVCGYNGWSDLPICYERECELPKIDVHLVPDRKKDQYKVGEVLKFSCKPGFTIVGPNSVQCYHFGLSPDLPICKEQVQSCGPPPELLNGNVKEKTKEEYGHSEVVEYYCNPRFLMKGPNKIQCVDGEWTTLPVCIVEESTCGDIPELEHGWAQLSSPPYYYGDSVEFNCSESFTMIGHRSITCIHGVWTQLPQCVAIDKLKKCKSSNLIILEEHLKNKKEFDHNSNIRYRCRGKEGWIHTVCINGRWDPEVNCSMAQIQLCPPPPQIPNSHNMTTTLNYRDGEKVSVLCQENYLIQEGEEITCKDGRWQSIPLCVEKIPCSQPPQIEHGTINSSRSSQESYAHGTKLSYTCEGGFRISEENETTCYMGKWSSPPQCEGLPCKSPPEISHGVVAHMSDSYQYGEEVTYKCFEGFGIDGPAIAKCLGEKWSHPPSCIKTDCLSLPSFENAIPMGEKKDVYKAGEQVTYTCATYYKMDGASNVTCINSRWTGRPTCRDTSCVNPPTVQNAYIVSRQMSKYPSGERVRYQCRSPYEMFGDEEVMCLNGNWTEPPQCKDSTGKCGPPPPIDNGDITSFPLSVYAPASSVEYQCQNLYQLEGNKRITCRNGQWSEPPKCLHPCVISREIMENYNIALRWTAKQKLYSRTGESVEFVCKRGYRLSSRSHTLRTTCWDGKLEYPTCAKR

SEQ ID NO: 13 - protein, 462 aa, Homo sapiens
MARVLGAPVALGLWSLCWSLAIATPLPPTSAHGNVAEGETKPDPDVTERCSDGWSFDATTLDDNGTMLFFKGEFVWKSHKWDRELISERWKNFPSPVDAAFRQGHNSVFLIKGDKVWVYPPEKKEKGYPKLLQDEFPGIPSPLDAAVECHRGECQAEGVLFFQGDREWFWDLATGTMKERSWPAVGNCSSALRWLGRYYCFQGNQFLRFDPVRGEVPPRYPRDVRDYFMPCPGRGHGHRNGTGHGNSTHHGPEYMRCSPHLVLSALTSDNHGATYAFSGTHYWRLDTSRDGWHSWPIAHQWPQGPSAVDAAFSWEEKLYLVQGTQVYVFLTKGGYTLVSGYPKRLEKEVGTPHGIILDSVDAAFICPGSSRLHIMAGRRLWWLDLKSGAQATWTELPWPHEKVDGALCMEKSLGPNSCSANGPGLYLIHGPNLYCYSDVEKLNAAKALPQPQNVTSLLGCTH

SEQ ID NO: 14 - protein, 377 aa, Homo sapiens
ASTKGPSVFPLAPCSRSTSGGTAALGCLVKDYFPEPVTVSWNSGALTSGVHTFPAVLQSSGLYSLSSVVTVPSSSLGTQTYTCNVNHKPSNTKVDKRVELKTPLGDTTHTCPRCPEPKSCDTPPPCPRCPEPKSCDTPPPCPRCPEPKSCDTPPPCPRCPAPELLGGPSVFLFPPKPKDTLMISRTPEVTCVVVDVSHEDPEVQFKWYVDGVEVHNAKTKPREEQYNSTFRVVSVLTVLHQDWLNGKEYKCKVSNKALPAPIEKTISKTKGQPREPQVYTLPPSREEMTKNQVSLTCLVKGFYPSDIAVEWESSGQPENNYNTTPPMLDSDGSFFLYSKLTVDKSRWQQGNIFSCSVMHEALHNRFTQKSLSLSPGK

SEQ ID NO: 15 - protein, 698 aa, Homo sapiens
MRLAVGALLVCAVLGLCLAVPDKTVRWCAVSEHEATKCQSFRDHMKSVIPSDGPSVACVKKASYLDCIRAIAANEADAVTLDAGLVYDAYLAPNNLKPVVAEFYGSKEDPQTFYYAVAVVKKDSGFQMNQLRGKKSCHTGLGRSAGWNIPIGLLYCDLPEPRKPLEKAVANFFSGSCAPCADGTDFPQLCQLCPGCGCSTLNQYFGYSGAFKCLKDGAGDVAFVKHSTIFENLANKADRDQYELLCLDNTRKPVDEYKDCHLAQVPSHTVVARSMGGKEDLIWELLNQAQEHFGKDKSKEFQLFSSPHGKDLLFKDSAHGFLKVPPRMDAKMYLGYEYVTAIRNLREGTCPEAPTDECKPVKWCALSHHERLKCDEWSVNSVGKIECVSAETTEDCIAKIMNGEADAMSLDGGFVYIAGKCGLVPVLAENYNKSDNCEDTPEAGYFAIAVVKKSASDLTWDNLKGKKSCHTAVGRTAGWNIPMGLLYNKINHCRFDEFFSEGCAPGSKKDSSLCKLCMGSGLNLCEPNNKEGYYGYTGAFRCLVEKGDVAFVKHQTVPQNTGGKNPDPWAKNLNEKDYELLCLDGTRKPVEEYANCHLARAPNHAVVTRKDKEACVHKILRQQQHLFGSNVTDCSGNFCLFRSETKDLLFRDDTVCLAKLHDRNTYEKYLGEEYVKAVGNLRKCSTSSLLEACTFRRP

SEQ ID NO: 16 - protein, 406 aa, Homo sapiens
MSALGAVIALLLWGQLFAVDSGNDVTDIADDGCPKPPEIAHGYVEHSVRYQCKNYYKLRTEGDGVYTLNDKKQWINKAVGDKLPECEADDGCPKPPEIAHGYVEHSVRYQCKNYYKLRTEGDGVYTLNNEKQWINKAVGDKLPECEAVCGKPKNPANPVQRILGGHLDAKGSFPWQAKMVSHHNLTTGATLINEQWLLTTAKNLFLNHSENATAKDIAPTLTLYVGKKQLVEIEKVVLHPNYSQVDIGLIKLKQKVSVNERVMPICLPSKDYAEVGRVGYVSGWGRNANFKFTDHLKYVMLPVADQDQCIRHYEGSTVPEKKTPKSPVGVQPILNEHTFCAGMSKYQEDTCYGDAGSAFAVHDLEEDTWYATGILSFDKSCAVAEYGVYVKVTSIQDWVQKTIAEN

SEQ ID NO: 17 - protein, 478 aa, Homo sapiens
MAPLRPLLILALLAWVALADQESCKGRCTEGFNVDKKCQCDELCSYYQSCCTDYTAECKPQVTRGDVFTMPEDEYTVYDDGEEKNNATVHEQVGGPSLTSDLQAQSKGNPEQTPVLKPEEEAPAPEVGASKPEGIDSRPETLHPGRPQPPAEEELCSGKPFDAFTDLKNGSLFAFRGQYCYELDEKAVRPGYPKLIRDVWGIEGPIDAAFTRINCQGKTYLFKGSQYWRFEDGVLDPDYPRNISDGFDGIPDNVDAALALPAHSYSGRERVYFFKGKQYWEYQFQHQPSQEECEGSSLSAVFEHFAMMQRDSWEDIFELLFWGRTSAGTRQPQFISRDWHGVPGQVDAAMAGRIYISGMAPRPSLAKKQRFRHRNRKGYRSQRGHSRGRNQNSRRPSRATWLSLFSSEESNLGANNYDDYRMDWLVPATCEPIQSVFFFSGDKYYRVNLRTRRVDTVDPPYPRSIAQYWLGCPAPGHL

SEQ ID NO: 18 - protein, 930 aa, Homo sapiens
MKPPRPVRTCSKVLVLLSLLAIHQTTTAEKNGIDIYSLTVDSRVSSRFAHTVVTSRVVNRANTVQEATFQMELPKKAFITNFSMIIDGMTYPGIIKEKAEAQAQYSAAVAKGKSAGLVKATGRNMEQFQVSVSVAPNAKITFELVYEELLKRRLGVYELLLKVRPQQLVKHLQMDIHIFEPQGISFLETESTFMTNQLVDALTTWQNKTKAHIRFKPTLSQQQKSPEQQETVLDGNLIIRYDVDRAISGGSIQIENGYFVHYFAPEGLTTMPKNVVFVIDKSGSMSGRKIQQTREALIKILDDLSPRDQFNLIVFSTEATQWRPSLVPASAENVNKARSFAAGIQALGGTNINDAMLMAVQLLDSSNQEERLPEGSVSLIILLTDGDPTVGETNPRSIQNNVREAVSGRYSLFCLGFGFDVSYAFLEKLALDNGGLARRIHEDSDSALQLQDFYQEVANPLLTAVTFEYPSNAVEEVTQNNFRLLFKGSEMVVAGKLQDRGPDVLTATVSGKLPTQNITFQTESSVAEQEAEFQSPKYIFHNFMERLWAYLTIQQLLEQTVSASDADQQALRNQALNLSLAYSFVTPLTSMVVTKPDDQEQSQVAEKPMEGESRNRNVHSGSTFFKYYLQGAKIPKPEASFSPRRGWNRQAGAAGSRMNFRPGVLSSRQLGLPGPPDVPDHAAYHPFRRLAILPASAPPATSNPDPAVSRVMNMKIEETTMTTQTPAPIQAPSAILPLPGQSVERLCVDPRHRQGPVNLLSDPEQGVEVTGQYEREKAGFSWIEVTFKNPLVWVHASPEHVVVTRNRRSSAYKWKETLFSVMPGLKMTMDKTGLLLLSDPDKVTIGLLFWDGRGEGLRLLLRDTDRFSSHVGGTLGQFYQEVLWGSPAASDDGRRTLRVQGNDHSATRERRLDYQEGPPGVEISCWSVEL

SEQ ID NO: 19 - protein, 327 aa, Homo sapiens
ASTKGPSVFPLAPCSRSTSESTAALGCLVKDYFPEPVTVSWNSGALTSGVHTFPAVLQSSGLYSLSSVVTVPSSSLGTKTYTCNVDHKPSNTKVDKRVESKYGPPCPSCPAPEFLGGPSVFLFPPKPKDTLMISRTPEVTCVVVDVSQEDPEVQFNWYVDGVEVHNAKTKPREEQFNSTYRVVSVLTVLHQDWLNGKEYKCKVSNKGLPSSIEKTISKAKGQPREPQVYTLPPSQEEMTKNQVSLTCLVKGFYPSDIAVEWESNGQPENNYKTTPPVLDSDGSFFLYSRLTVDKSRWQEGNVFSCSVMHEALHNHYTQKSLSLSLGK

SEQ ID NO: 20 - protein, 340 aa, Homo sapiens
ASPTSPKVFPLSLDSTPQDGNVVVACLVQGFFPQEPLSVTWSESGQNVTARNFPPSQDASGDLYTTSSQLTLPATQCPDGKSVTCHVKHYTNSSQDVTVPCRVPPPPPCCHPRLSLHRPALEDLLLGSEANLTCTLTGLRDASGATFTWTPSSGKSAVQGPPERDLCGCYSVSSVLPGCAQPWNHGETFTCTAAHPELKTPLTANITKSGNTFRPEVHLLPPPSEELALNELVTLTCLARGFSPKDVLVRWLQGSQELPREKYLTWASRQEPSQGTTTYAVTSILRVAAEDWKKGETFSCMVGHEALPLAFTQKTIDRMAGKPTHINVSVVMAEADGTCY

SEQ ID NO: 21 - protein, 24 aa, Artificial Sequence
  Synthetic Construct
QIPLCANLVPVPITNATLDQITGK

SEQ ID NO: 22 - protein, 15 aa, Artificial Sequence
  Synthetic Construct
EYESYSDFERNVTEK

SEQ ID NO: 23 - protein, 27 aa, Artificial Sequence
  Synthetic Construct
LSLHRPALEDLLLGSEANLTCTLTGLR

SEQ ID NO: 24 - protein, 19 aa, Artificial Sequence
  Synthetic Construct
LQAPLNYTEFQKPICLPSK

SEQ ID NO: 25 - protein, 16 aa, Artificial Sequence
  Synthetic Construct
YTGNASALFILPDQDK

SEQ ID NO: 26 - protein, 13 aa, Artificial Sequence
  Synthetic Construct
WNCWSNWSSCSGR

SEQ ID NO: 27 - protein, 15 aa, Artificial Sequence
  Synthetic Construct
VCQDCPLLAPLNDTR

SEQ ID NO: 28 - protein, 14 aa, Artificial Sequence
  Synthetic Construct
LANLTQGEDQYYLR

SEQ ID NO: 29 - protein, 32 aa, Artificial Sequence
  Synthetic Construct
SLGNVNFTVSAEALESQELCGTEVPSVPEHGR

SEQ ID NO: 30 - protein, 18 aa, Artificial Sequence
  Synthetic Construct
IPCSQPPQIEHGTINSSR

SEQ ID NO: 31 - protein, 13 aa, Artificial Sequence
  Synthetic Construct
ISEENETTCYMGK

SEQ ID NO: 32 - protein, 16 aa, Artificial Sequence
  Synthetic Construct
ALPQPQNVTSLLGCTH

SEQ ID NO: 33 - protein, 9 aa, Artificial Sequence
  Synthetic Construct
EEQYNSTFR

SEQ ID NO: 34 - protein, 8 aa, Artificial Sequence
  Synthetic Construct
GVNFNVSK

SEQ ID NO: 35 - protein, 13 aa, Artificial Sequence
  Synthetic Construct
CGLVPVLAENYNK

SEQ ID NO: 36 - protein, 17 aa, Artificial Sequence
  Synthetic Construct
TTPPVLDSDGSFFLYSR

SEQ ID NO: 37 - protein, 21 aa, Artificial Sequence
  Synthetic Construct
TPEVTCVVVDVSHEDPEVQFK

SEQ ID NO: 38 - protein, 24 aa, Artificial Sequence
  Synthetic Construct
MVSHHNLTTGATLINEQWLLTTAK

SEQ ID NO: 39 - protein, 8 aa, Artificial Sequence
  Synthetic Construct
NGSLFAFR

SEQ ID NO: 40 - protein, 13 aa, Artificial Sequence
  Synthetic Construct
NLFLNHSENATAK

SEQ ID NO: 41 - protein, 16 aa, Artificial Sequence
  Synthetic Construct
VVLHPNYSQVDIGLIK

SEQ ID NO: 42 - protein, 25 aa, Artificial Sequence
  Synthetic Construct
LPTQNITFQTESSVAEQEAEFQSPK

SEQ ID NO: 43 - protein, 20 aa, Artificial Sequence
  Synthetic Construct
TLNQSSDELQLSMGNAMFVK

SEQ ID NO: 44 - protein, 15 aa, Artificial Sequence
  Synthetic Construct
VTACHSSQPNATLYK

SEQ ID NO: 45 - protein, 9 aa, Artificial Sequence
  Synthetic Construct
EEQYNSTYR

SEQ ID NO: 46 - protein, 9 aa, Artificial Sequence
  Synthetic Construct
EEQFNSTFR

SEQ ID NO: 47-100 - skipped (54 entries)

SEQ ID NO: 101 - protein, 10 aa, Artificial Sequence
  Synthetic Construct
DLLLPQPDLR

SEQ ID NO: 102 - protein, 13 aa, Artificial Sequence
  Synthetic Construct
SLDFTELDVAAEK

SEQ ID NO: 103 - protein, 30 aa, Artificial Sequence
  Synthetic Construct
  VARIANT 1: Linked to glycan structure GL NO. 5412
QLAHQSNSTNIFFSPVSIATAFAMLSLGTK

SEQ ID NO: 104 - protein, 24 aa, Artificial Sequence
  Synthetic Construct
  VARIANT 1: Linked to glycan structure GL NO. 5412
MVSHHNLTTGATLINEQWLLTTAK

SEQ ID NO: 105 - protein, 16 aa, Artificial Sequence
  Synthetic Construct
  VARIANT 3: Linked to glycan structure GL NO. 6513
VVLHPNYSQVDIGLIK

SEQ ID NO: 106 - protein, 13 aa, Artificial Sequence
  Synthetic Construct
  VARIANT 2: Linked to glycan structure GL NO. 5412
SWPAVGNCSSALR

SEQ ID NO: 107 - protein, 8 aa, Artificial Sequence
  Synthetic Construct
  VARIANT 1: Linked to glycan structure GL NO. 1102
VATTVISK

SEQ ID NO: 108 - protein, 24 aa, Artificial Sequence
  Synthetic Construct
  VARIANT 1: Linked to glycan structure GL NO. 6513
MVSHHNLTTGATLINEQWLLTTAK

SEQ ID NO: 109 - protein, 19 aa, Artificial Sequence
  Synthetic Construct
FSEFWDLDPEVRPTSAVAA

SEQ ID NO: 110 - protein, 21 aa, Artificial Sequence
  Synthetic Construct
  VARIANT 2: Linked to glycan structure GL NO. 5500
GLTFQQNASSMCVPDQDTAIR

SEQ ID NO: 111 - skipped

SEQ ID NO: 112 - protein, 15 aa, Artificial Sequence
  Synthetic Construct
  VARIANT 1: Linked to glycan structure GL NO. 5412
VCQDCPLLAPLNDTR

SEQ ID NO: 113 - protein, 10 aa, Artificial Sequence
  Synthetic Construct
VNHVTLSQPK

SEQ ID NO: 114 - protein, 19 aa, Artificial Sequence
  Synthetic Construct
  VARIANT 3: Linked to glycan structure GL NO. 5412
VLSNNSDANLELINTWVAK

SEQ ID NO: 115 - protein, 16 aa, Artificial Sequence
  Synthetic Construct
  VARIANT 1: Linked to glycan structure GL NO. 5412
EHEGAIYPDNTTDFQR

SEQ ID NO: 116 - protein, 21 aa, Artificial Sequence
  Synthetic Construct
  VARIANT 2: Linked to glycan structure GL NO. 5501
GLTFQQNASSMCVPDQDTAIR

SEQ ID NO: 117 - protein, 26 aa, Artificial Sequence
  Synthetic Construct
  VARIANT 3: Linked to glycan structure GL NO. 5402
WVLTAAHCLLYPPWDKNFTENDLLVR

SEQ ID NO: 118 - protein, 21 aa, Artificial Sequence
  Synthetic Construct
  VARIANT 2: Linked to glycan structure GL NO. 5412
QQQHLFGSNVTDCSGNFCLFR

SEQ ID NO: 119 - protein, 22 aa, Artificial Sequence
  Synthetic Construct
  VARIANT 2: Linked to glycan structure GL NO. 6501
AALAAFNAQNNGSNFQLEEISR

SEQ ID NO: 120 - protein, 6 aa, Artificial Sequence
  Synthetic Construct
  VARIANT 1: Linked to glycan structure GL NO. 5412
ANISHK

SEQ ID NO: 121 - protein, 22 aa, Artificial Sequence
  Synthetic Construct
  VARIANT 2: Linked to glycan structure GL NO. 5412
AALAAFNAQNNGSNFQLEEISR

SEQ ID NO: 122 - protein, 13 aa, Artificial Sequence
  Synthetic Construct
  VARIANT 3: Linked to glycan structure GL NO. 5401
ISEENETTCYMGK

SEQ ID NO: 123 - protein, 9 aa, Artificial Sequence
  Synthetic Construct
  VARIANT 1: Linked to glycan structure GL NO. 4511
EEQYNSTYR

SEQ ID NO: 124 - protein, 33 aa, Artificial Sequence
  Synthetic Construct
  VARIANT 2: Linked to glycan structure GL NO. 5200
IITILEEEMNVSVCGLYTYGKPVPGHVTVSICR

SEQ ID NO: 125 - protein, 16 aa, Artificial Sequence
  Synthetic Construct
  VARIANT 1: Linked to glycan structure GL NO. 5402
EHEGAIYPDNTTDFQR

SEQ ID NO: 126 - protein, 9 aa, Artificial Sequence
  Synthetic Construct
  VARIANT 1: Linked to glycan structure GL NO. 4510
TPLTANITK

SEQ ID NO: 127 - protein, 19 aa, Artificial Sequence
  Synthetic Construct
  VARIANT 1: Linked to glycan structure GL NO. 5402
VIDFNCTTSSVSSALANTK

SEQ ID NO: 128 - protein, 13 aa, Artificial Sequence
  Synthetic Construct
  VARIANT 2: Linked to glycan structure GL NO. 121005
NLFLNHSENATAK

SEQ ID NO: 129 - protein, 20 aa, Artificial Sequence
  Synthetic Construct
  VARIANT 1: Linked to glycan structure GL NO. 7604
FNLTETSEAEIHQSFQHLLR

SEQ ID NO: 130 - protein, 20 aa, Artificial Sequence
  Synthetic Construct
  VARIANT 3: Linked to glycan structure GL NO. 6503
ENLTAPGSDSAVFFEQGTTR

SEQ ID NO: 131 - protein, 13 aa, Artificial Sequence
  Synthetic Construct
  VARIANT 2: Linked to glycan structure GL NO. 11904
NLFLNHSENATAK

SEQ ID NO: 132 - protein, 347 aa, Homo sapiens
MSSWSRQRPKSPGGIQPHVSRTLFLLLLLAASAWGVTLSPKDCQVFRSDHGSSISCQPPAEIPGYLPADTVHLAVEFFNLTHLPANLLQGASKLQELHLSSNGLESLSPEFLRPVPQLRVLDLTRNALTGLPPGLFQASATLDTLVLKENQLEVLEVSWLHGLKALGHLDLSGNRLRKLPPGLLANFTLLRTLDLGENQLETLPPDLLRGPLQLERLHLEGNKLQVLGKDLLLPQPDLRYLFLNGNKLARVAAGAFQGLRQLDMLDLSNNSLASVPEGLWASLGQPNWDMRDGFDISGNPWICDQNLSDLYRWLQAQKDKMFSQNDTRCAGPEAVKGQTLLAVAKSQ

SEQ ID NO: 133 - protein, 476 aa, Homo sapiens
MAPAGVSLRATILCLLAWAGLAAGDRVYIHPFHLVIHNESTCEQLAKANAGKPKDPTFIPAPIQAKTSPVDEKALQDQLVLVAAKLDTEDKLRAAMVGMLANFLGFRIYGMHSELWGVVHGATVLSPTAVFGTLASLYLGALDHTADRLQAILGVPWKDKNCTSRLDAHKVLSALQAVQGLLVAQGRADSQAQLLLSTVVGVFTAPGLHLKQPFVQGLALYTPVVLPRSLDFTELDVAAEKIDRFMQAVTGWKTGCSLMGASVDSTLAFNTYVHFQGKMKGFSLLAEPQEFWVDNSTSVSVPMLSGMGTFQHWSDIQDNFSVTQVPFTESACLLLIQPHYASDLDKVEGLTFQQNSLNWMKKLSPRTIHLTMPQLVLQGSYDLQDLLAQAELPAILHTELNLQKLSNDRIRVGEVLNSIFFELEADEREPTESTQQLNKPEVLEVTLNRPFLFAVYDQSATALHFLGRVANPLSTA

SEQ ID NO: 134 - protein, 406 aa, Homo sapiens; identical to SEQ ID NO: 16

SEQ ID NO: 135 - protein, 462 aa, Homo sapiens; identical to SEQ ID NO: 13

SEQ ID NO: 136 - protein, 500 aa, Homo sapiens
MASRLTLLTLLLLLLAGDRASSNPNATSSSSQDPESLQDRGEGKVATTVISKMLFVEPILEVSSLPTTNSTTNSATKITANTTDEPTTQPTTEPTTQPTIQPTQPTTQLPTDSPTQPTTGSFCPGPVTLCSDLESHSTEAVLGDALVDFSLKLYHAFSAMKKVETNMAFSPFSIASLLTQVLLGAGENTKTNLESILSYPKDFTCVHQALKGFTTKGVTSVSQIFHSPDLAIRDTFVNASRTLYSSSPRVLSNNSDANLELINTWVAKNTNNKISRLLDSLPSDTRLVLLNAIYLSAKWKTTFDPKKTRMEPFHFKNSVIKVPMMNSKKYPVAHFIDQTLKAKVGQLQLSHNLSLVILVPQNLKHRLEDMEQALSPSVFKAIMEKLEMSKFQPTLLTLPRIKVTTSQDMLSIMEKLEFFDFSYDLNLCGLTEDPDLQVSAMQHQTVLELTETGVEAAAASAISVARTLLVFEVQQPFLFVLWDQQHKFPVFMGRVYDPRA

SEQ ID NO: 137 - protein, 406 aa, Homo sapiens; identical to SEQ ID NO: 16

SEQ ID NO: 138 - protein, 99 aa, Homo sapiens
MQPRVLLVVALLALLASARASEAEDASLLSFMQGYMKHATKTAKDALSSVQESQVAQQARGWVTDGFSSLKDYWSTVKDKFSEFWDLDPEVRPTSAVAA

SEQ ID NO: 139 - protein, 453 aa, Homo sapiens
GSASAPTLFPLVSCENSPSDTSSVAVGCLAQDFLPDSITFSWKYKNNSDISSTRGFPSVLRGGKYAATSQVLLPSKDVMQGTDEHVVCKVQHPNGNKEKNVPLPVIAELPPKVSVFVPPRDGFFGNPRKSKLICQATGFSPRQIQVSWLREGKQVGSGVTTDQVQAEAKESGPTTYKVTSTLTIKESDWLGQSMFTCRVDHRGLTFQQNASSMCVPDQDTAIRVFAIPPSFASIFLTKSTKLTCLVTDLTTYDSVTISWTRQNGEAVKTHTNISESHPNATFSAVGEASICEDDWNSGERFTCTVTHTDLPSPLKQTISRPKGVALHRPDVYLLPPAREQLNLRESATITCLVTGFSPADVFVQWMQRGQPLSPEKYVTSAPMPEPQAPGRYFAHSILTVSEEEWNTGETYTCVVAHEALPNRVTERTVDKSTGKPTLYNVSLVMSDTAGTCY

SEQ ID NO: 140 - protein, 367 aa, Homo sapiens; identical to SEQ ID NO: 9

SEQ ID NO: 141 - protein, 119 aa, Homo sapiens
MSRSVALAVLALLSLSGLEAIQRTPKIQVYSRHPAENGKSNFLNCYVSGFHPSDIEVDLLKNGERIEKVEHSDLSFSKDWSFYLLYYTEFTPTEKDEYACRVNHVTLSQPKIVKWDRDM

SEQ ID NO: 142 - protein, 500 aa, Homo sapiens; identical to SEQ ID NO: 136

SEQ ID NO: 143 - protein, 1065 aa, Homo sapiens
MKILILGIFLFLCSTPAWAKEKHYYIGIIETTWDYASDHGEKKLISVDTEHSNIYLQNGPDRIGRLYKKALYLQYTDETFRTTIEKPVWLGFLGPIIKAETGDKVYVHLKNLASRPYTFHSHGITYYKEHEGAIYPDNTTDFQRADDKVYPGEQYTYMLLATEEQSPGEGDGNCVTRIYHSHIDAPKDIASGLIGPLIICKKDSLDKEKEKHIDREFVVMFSVVDENFSWYLEDNIKTYCSEPEKVDKDNEDFQESNRMYSVNGYTFGSLPGLSMCAEDRVKWYLFGMGNEVDVHAAFFHGQALTNKNYRIDTINLFPATLFDAYMVAQNPGEWMLSCQNLNHLKAGLQAFFQVQECNKSSSKDNIRGKHVRHYYIAAEEIIWNYAPSGIDIFTKENLTAPGSDSAVFFEQGTTRIGGSYKKLVYREYTDASFTNRKERGPEEEHLGILGPVIWAEVGDTIRVTFHNKGAYPLSIEPIGVRFNKNNEGTYYSPNYNPQSRSVPPSASHVAPTETFTYEWTVPKEVGPTNADPVCLAKMYYSAVDPTKDIFTGLIGPMKICKKGSLHANGRQKDVDKEFYLFPTVFDENESLLLEDNIRMFTTAPDQVDKEDEDFQESNKMHSMNGFMYGNQPGLTMCKGDSVVWYLFSAGNEADVHGIYFSGNTYLWRGERRDTANLFPQTSLTLHMWPDTEGTFNVECLTTDHYTGGMKQKYTVNQCRRQSEDSTFYLGERTYYIAAVEVEWDYSPQREWEKELHHLQEQNVSNAFLDKGEFYIGSKYKKVVYRQYTDSTFRVPVERKAEEEHLGILGPQLHADVGDKVKIIFKNMATRPYSIHAHGVQTESSTVTPTLPGETLTYVWKIPERSGAGTEDSACIPWAYYSTVDQVKDLYSGLIGPLIVCRRPYLKVFNPRRKLEFALLFLVFDENESWYLDDNIKTYSDHPEKVNKDDEEFIESNKMHAINGRMFGNLQGLTMHVGDEVNWYLMGMGNEIDLHTVHFHGHSFQYKHRGVYSSDVFDIFPGTYQTLEMFPRTPGIWLLHCHVTDHIHAGMETTYTVLQNEDTKSG

SEQ ID NO: 144 - protein, 453 aa, Homo sapiens; identical to SEQ ID NO: 139

SEQ ID NO: 145 - protein, 622 aa, Homo sapiens
MAHVRGLQLPGCLALAALCSLVHSQHVFLAPQQARSLLQRVRRANTFLEEVRKGNLERECVEETCSYEEAFEALESSTATDVFWAKYTACETARTPRDKLAACLEGNCAEGLGTNYRGHVNITRSGIECQLWRSRYPHKPEINSTTHPGADLQENFCRNPDSSTTGPWCYTTDPTVRRQECSIPVCGQDQVTVAMTPRSEGSSVNLSPPLEQCVPDRGQQYQGRLAVTTHGLPCLAWASAQAKALSKHQDFNSAVQLVENFCRNPDGDEEGVWCYVAGKPGDFGYCDLNYCEEAVEEETGDGLDEDSDRAIEGRTATSEYQTFFNPRTFGSGEADCGLRPLFEKKSLEDKTERELLESYIDGRIVEGSDAEIGMSPWQVMLFRKSPQELLCGASLISDRWVLTAAHCLLYPPWDKNFTENDLLVRIGKHSRTRYERNIEKISMLEKIYIHPRYNWRENLDRDIALMKLKKPVAFSDYIHPVCLPDRETAASLLQAGYKGRVTGWGNLKETWTANVGKGQPSVLQVVNLPIVERPVCKDSTRIRITDNMFCAGYKPDEGKRGDACEGDSGGPFVMKSPFNNRWYQMGIVSWGEGCDRDGKYGFYTHVFRLKKWIQKVIDQFGE

SEQ ID NO: 146 - protein, 698 aa, Homo sapiens; identical to SEQ ID NO: 15

SEQ ID NO: 147 - protein, 367 aa, Homo sapiens; identical to SEQ ID NO: 9

SEQ ID NO: 148 - protein, 1676 aa, Homo sapiens
MGLLGILCFLIFLGKTWGQEQTYVISAPKIFRVGASENIVIQVYGYTEAFDATISIKSYPDKKFSYSSGHVHLSSENKFQNSAILTIQPKQLPGGQNPVSYVYLEVVSKHFSKSKRMPITYDNGFLFIHTDKPVYTPDQSVKVRVYSLNDDLKPAKRETVLTFIDPEGSEVDMVEEIDHIGIISFPDFKIPSNPRYGMWTIKAKYKEDFSTTGTAYFEVKEYVLPHFSVSIEPEYNFIGYKNFKNFEITIKARYFYNKVVTEADVYITFGIREDLKDDQKEMMQTAMQNTMLINGIAQVTFDSETAVKELSYYSLEDLNNKYLYIAVTVIESTGGFSEEAEIPGIKYVLSPYKLNLVATPLFLKPGIPYPIKVQVKDSLDQLVGGVPVTLNAQTIDVNQETSDLDPSKSVTRVDDGVASFVLNLPSGVTVLEFNVKTDAPDLPEENQAREGYRAIAYSSLSQSYLYIDWTDNHKALLVGEHLNIIVTPKSPYIDKITHYNYLILSKGKIIHFGTREKFSDASYQSINIPVTQNMVPSSRLLVYYIVTGEQTAELVSDSVWLNIEEKCGNQLQVHLSPDADAYSPGQTVSLNMATGMDSWVALAAVDSAVYGVQRGAKKPLERVFQFLEKSDLGCGAGGGLNNANVFHLAGLTFLTNANADDSQENDEPCKEILRPRRTLQKKIEEIAAKYKHSVVKKCCYDGACVNNDETCEQRAARISLGPRCIKAFTECCVVASQLRANISHKDMQLGRLHMKTLLPVSKPEIRSYFPESWLWEVHLVPRRKQLQFALPDSLTTWEIQGVGISNTGICVADTVKAKVFKDVFLEMNIPYSVVRGEQIQLKGTVYNYRTSGMQFCVKMSAVEGICTSESPVIDHQGTKSSKCVRQKVEGSSSHLVTFTVLPLEIGLHNINFSLETWFGKEILVKTLRVVPEGVKRESYSGVTLDPRGIYGTISRRKEFPYRIPLDLVPKTEIKRILSVKGLLVGEILSAVLSQEGINILTHLPKGSAEAELMSVVPVFYVFHYLETGNHWNIFHSDPLIEKQKLKKKLKEGMLSIMSYRNADYSYSVWKGGSASTWLTAFALRVLGQVNKYVEQNQNSICNSLLWLVENYQLDNGSFKENSQYQPIKLQGTLPVEARENSLYLTAFTVIGIRKAFDICPLVKIDTALIKADNFLLENTLPAQSTFTLAISAYALSLGDKTHPQFRSIVSALKREALVKGNPPIYRFWKDNLQHKDSSVPNTGTARMVETTAYALLTSLNLKDINYVNPVIKWLSEEQRYGGGFYSTQDTINAIEGLTEYSLLVKQLRLSMDIDVSYKHKGALHNYKMTDKNFLGRPVEVLLNDDLIVSTGFGSGLATVHVTTVVHKTSTSEEVCSFYLKIDTQDIEASHYRGYGNSDYKRIVACASYKPSREESSSGSSHAVMDISLPTGISANEEDLKALVEGVDQLFTDYQIKDGHVILQLNSIPSSDFLCVRFRIFELFEVGFLSPATFTVYEYHRPDKQCTMFYSTSNIKIQKVCEGAACKCVEADCGQMQEELDLTISAETRKQTACKPEIAYAYKVSITSITVENVFVKYKATLLDIYKTGEAVAEKDSEITFIKKVTCTNAELVKGRQYLIMGKEALQIKYNFSFRYIYPLDSLTWIEYWPRDTTCSSCQAFLANLDEFAEDIFLNGC

SEQ ID NO: 149 - protein, 367 aa, Homo sapiens; identical to SEQ ID NO: 9

SEQ ID NO: 150 - protein, 1231 aa, Homo sapiens; identical to SEQ ID NO: 12

SEQ ID NO: 151 - protein, 330 aa, Homo sapiens [sequence omitted]

SEQ ID NO: 152 - protein, 1474 aa, Homo sapiens; identical to SEQ ID NO: 11

SEQ ID NO: 153 - protein, 1065 aa, Homo sapiens; identical to SEQ ID NO: 143

SEQ ID NO: 154 - protein, 340 aa, Homo sapiens; identical to SEQ ID NO: 20

SEQ ID NO: 155 - protein, 525 aa, Homo sapiens
MKALIAALLLITLQYSCAVSPTDCSAVEPEAEKALDLINKRRRDGYLFQLLRIADAHLDRVENTTVYYLVLDVQESDCSVLSRKYWNDCEPPDSRRPSEIVIGQCKVIATRHSHESQDLRVIDFNCTTSSVSSALANTKDSPVLIDFFEDTERYRKQANKALEKYKEENDDFASFRVDRIERVARVRGGEGTGYFVDFSVRNCPRHHFPRHPNVFGFCRADLFYDVEALDLESPKNLVINCEVFDPQEHENINGVPPHLGHPFHWGGHERSSTTKPPFKPHGSRDHHHPHKPHEHGPPPPPDERDHSHGPPLPQGPPPLLPMSCSSCQHATFGTNGAQRHSHNNNSSDLHPHKHHSHEQHPHGHHPHAHHPHEHDTHRQHPHGHHPHGHHPHGHHPHGHHPHGHHPHCHDFQDYGPCDPPPHNQGHCCHGHGPPPGHLRRRGPGKGPRPFHCRQIGSVYRLPPLRKGEVLPLPEANFPSFPLPHHKHPLKPDNQPFPQSVSESCPGKFKSGFPQVSMFFTHTFPK

SEQ ID NO: 156 - protein, 406 aa, Homo sapiens; identical to SEQ ID NO: 16

SEQ ID NO: 157 - protein, 423 aa, Homo sapiens; identical to SEQ ID NO: 8

SEQ ID NO: 158 - protein, 406 aa, Homo sapiens; identical to SEQ ID NO: 16

SEQ ID NO: 159 - protein, 21 aa, Artificial Sequence
  Synthetic Construct
  VARIANT 9: Linked to glycan structure GL NO. 6513
QQQHLFGSNVTDCSGNFCLFR

SEQ ID NO: 160 - protein, 15 aa, Artificial Sequence
  Synthetic Construct
  VARIANT 7: Linked to glycan structure GL NO. 6513
QDQCIYNTTYLNVQR

SEQ ID NO: 161 - protein, 9 aa, Artificial Sequence
  Synthetic Construct
  VARIANT 5: Linked to glycan structure GL NO. 5510
EEQFNSTFR

SEQ ID NO: 162 - protein, 9 aa, Artificial Sequence
  Synthetic Construct
  VARIANT 5: Linked to glycan structure GL NO. 5410
EEQYNSTYR

SEQ ID NO: 163 - protein, 16 aa, Artificial Sequence
  Synthetic Construct
  VARIANT 4: Linked to glycan structure GL NO. 6502
YTGNASALFILPDQDK

SEQ ID NO: 164 - protein, 7 aa, Artificial Sequence
  Synthetic Construct
  VARIANT 2: Linked to glycan structure GL NO. 6503
ENGTISR

SEQ ID NO: 165 - protein, 9 aa, Artificial Sequence
  Synthetic Construct
  VARIANT 5: Linked to glycan structure GL NO. 3410
EEQYNSTYR

SEQ ID NO: 166 - protein, 9 aa, Artificial Sequence
  Synthetic Construct
  VARIANT 5: Linked to glycan structure GL NO. 5510
EEQYNSTYR

SEQ ID NO: 167 - protein, 23 aa, Artificial Sequence
  Synthetic Construct
  VARIANT 2: Linked to glycan structure GL NO. 6503
NNATVHEQVGGPSLTSDLQAQSK

SEQ ID NO: 168 - protein, 16 aa, Artificial Sequence
  Synthetic Construct
  VARIANT 6: Linked to glycan structure GL NO. 6513
VVLHPNYSQVDIGLIK

SEQ ID NO: 169 - protein, 17 aa, Artificial Sequence
  Synthetic Construct
  VARIANT 9: Linked to glycan structure GL NO. 6523
ELHHLQEQNVSNAFLDK

SEQ ID NO: 170 - protein, 14 aa, Artificial Sequence
  Synthetic Construct
  VARIANT 6: Linked to glycan structure GL NO. 5412
HSHNNNSSDLHPHK

SEQ ID NO: 171 - protein, 13 aa, Artificial Sequence
  Synthetic Construct
  VARIANT 5: Linked to glycan structure GL NO. 5401
NLFLNHSENATAK

SEQ ID NO: 172 - protein, 15 aa, Artificial Sequence
  Synthetic Construct
  VARIANT 7: Linked to glycan structure GL NO. 8704
QDQCIYNTTYLNVQR

SEQ ID NO: 173 - protein, 19 aa, Artificial Sequence
  Synthetic Construct
  VARIANT 5: Linked to glycan structure GL NO. 5402
VIDFNCTTSSVSSALANTK

SEQ ID NO: 174 - protein, 16 aa, Artificial Sequence
  Synthetic Construct
  VARIANT 4: Linked to glycan structure GL NO. 5401
YLGNATAIFFLPDEGK

SEQ ID NO: 175 - protein, 12 aa, Artificial Sequence
  Synthetic Construct
  VARIANT 9: Linked to glycan structure GL NO. 5412
ITYSIVQTNCSK

SEQ ID NO: 176 - protein, 13 aa, Artificial Sequence
  Synthetic Construct
  VARIANT 12: Linked to glycan structure GL NO. 5401
CGLVPVLAENYNK

SEQ ID NO: 177 - protein, 9 aa, Artificial Sequence
  Synthetic Construct
  VARIANT 5: Linked to glycan structure GL NO. 5410
EEQFNSTFR

SEQ ID NO: 178 - protein, 21 aa, Artificial Sequence
  Synthetic Construct
  VARIANT 9: Linked to glycan structure GL NO. 5400
QQQHLFGSNVTDCSGNFCLFR

SEQ ID NO: 179 - protein, 15 aa, Artificial Sequence
  Synthetic Construct
  VARIANT 7: Linked to glycan structure GL NO. 7603
QDQCIYNTTYLNVQR

SEQ ID NO: 180 - protein, 17 aa, Artificial Sequence
  Synthetic Construct
  VARIANT 9: Linked to glycan structure GL NO. 6512
ELHHLQEQNVSNAFLDK

SEQ ID NO: 181 - protein, 32 aa, Artificial Sequence
  Synthetic Construct
  VARIANT 14: Linked to glycan structure GL NO. 6502
ADTHDEILEGLNFNLTEIPEAQIHEGFQELLR

SEQ ID NO: 182 - protein, 19 aa, Artificial Sequence
  Synthetic Construct
  VARIANT 6: Linked to glycan structure GL NO. 5400
LQAPLNYTEFQKPICLPSK

SEQ ID NO: 183 - protein, 9 aa, Artificial Sequence
  Synthetic Construct
  VARIANT 5: Linked to glycan structure GL NO. 5411
EEQYNSTYR

SEQ ID NO: 184 - protein, 13 aa, Artificial Sequence
  Synthetic Construct
  VARIANT 5,9: Linked to glycan structure GL NO. 121005
NLFLNHSENATAK

SEQ ID NO: 185 - protein, 22 aa, Artificial Sequence
  Synthetic Construct
  VARIANT 11: Linked to glycan structure GL NO. 5412
AALAAFNAQNNGSNFQLEEISR

SEQ ID NO: 186 - protein, 16 aa, Artificial Sequence
  Synthetic Construct
  VARIANT 6: Linked to glycan structure GL NO. 5412
VVLHPNYSQVDIGLIK

SEQ ID NO: 187 - protein, 18 aa, Artificial Sequence
  Synthetic Construct
  VARIANT 15: Linked to glycan structure GL NO. 5401
IPCSQPPQIEHGTINSSR

SEQ ID NO: 188 - protein, 15 aa, Artificial Sequence
  Synthetic Construct
  VARIANT 7: Linked to glycan structure GL NO. 6502
QDQCIYNTTYLNVQR

SEQ ID NO: 189 - protein, 21 aa, Artificial Sequence
  Synthetic Construct
  VARIANT 9: Linked to glycan structure GL NO. 5412
VGQLQLSHNLSLVILVPQNLK

SEQ ID NO: 190 - protein, 13 aa, Artificial Sequence
  Synthetic Construct
SWPAVGNCSSALR

SEQ ID NO: 191 - protein, 21 aa, Artificial Sequence
  Synthetic Construct
  VARIANT 6: Linked to glycan structure GL NO. 5401
IVGGTNSSWGEWPWQVSLQVK

SEQ ID NO: 192 - protein, 11 aa, Artificial Sequence
  Synthetic Construct
  VARIANT 2: Linked to glycan structure GL NO. 5412
ENISDPTSPLR

SEQ ID NO: 193 - protein, 24 aa, Artificial Sequence
  Synthetic Construct
  VARIANT 15: Linked to glycan structure GL NO. 7614
SVQEIQATFFYFTPNKTEDTIFLR

SEQ ID NO: 194 - protein, 21 aa, Artificial Sequence
  Synthetic Construct
  VARIANT 9: Linked to glycan structure GL NO. 5401
QQQHLFGSNVTDCSGNFCLFR

SEQ ID NO: 195 - protein, 21 aa, Artificial Sequence
  Synthetic Construct
  VARIANT 9: Linked to glycan structure GL NO. 5411
QQQHLFGSNVTDCSGNFCLFR

SEQ ID NO: 196 - protein, 21 aa, Artificial Sequence
  Synthetic Construct
  VARIANT 7: Linked to glycan structure GL NO. 5512
GLTFQQNASSMCVPDQDTAIR

SEQ ID NO: 197 - protein, 43 aa, Artificial Sequence
  Synthetic Construct
FSVATQTCQITPAEGPVVTAQYDCLGCVHPISTQSPDLEPILR

SEQ ID NO: 198 - protein, 13 aa, Artificial Sequence
  Synthetic Construct
  VARIANT 7: Linked to glycan structure GL NO. 5402
LQNNENNISCVER

SEQ ID NO: 199 - protein, 9 aa, Artificial Sequence
  Synthetic Construct
  VARIANT 5: Linked to glycan structure GL NO. 4500
EEQYNSTYR

SEQ ID NO: 200 - protein, 15 aa, Artificial Sequence
  Synthetic Construct
  VARIANT 7: Linked to glycan structure GL NO. 7612
QDQCIYNTTYLNVQR

SEQ ID NO: 201 - protein, 16 aa, Artificial Sequence
  Synthetic Construct
  VARIANT 4: Linked to glycan structure GL NO. 5402
YLGNATAIFFLPDEGK

SEQ ID NO: 202 - protein, 16 aa, Artificial Sequence
  Synthetic Construct
  VARIANT 4: Linked to glycan structure GL NO. 6503
YLGNATAIFFLPDEGK

SEQ ID NO: 203 - protein, 12 aa, Artificial Sequence
  Synthetic Construct
  VARIANT 6: Linked to glycan structure GL NO. 5412
LNAENNATFYFK

SEQ ID NO: 204 - protein, 14 aa, Artificial Sequence
  Synthetic Construct
  VARIANT 11: Linked to glycan structure GL NO. 6200
QSVPAHFVALNGSK

SEQ ID NO: 205 - protein, 14 aa, Artificial Sequence
  Synthetic Construct
  VARIANT 1: Linked to glycan structure GL NO. 2202
SSTTKPPFKPHGSR

SEQ ID NO: 206 - protein, 22 aa, Artificial Sequence
  Synthetic Construct
  VARIANT 16: Linked to glycan structure GL NO. 5412
ADGTVNQIEGEATPVNLTEPAK

SEQ ID NO: 207 - protein, 10 aa, Artificial Sequence
  Synthetic Construct
  VARIANT 6: Linked to glycan structure GL NO. 5402
DIENFNSTQK

SEQ ID NO: 208 - protein, 698 aa, Homo sapiens; identical to SEQ ID NO: 15

SEQ ID NO: 209 - protein, 201 aa, Homo sapiens; identical to SEQ ID NO: 4

SEQ ID NO: 210 - protein, 326 aa, Homo sapiens; identical to SEQ ID NO: 2

SEQ ID NO: 211 - protein, 330 aa, Homo sapiens [sequence omitted]

SEQ ID NO: 212 - protein, 423 aa, Homo sapiens; identical to SEQ ID NO: 8

SEQ ID NO: 213 - protein, 201 aa, Homo sapiens; identical to SEQ ID NO: 4

SEQ ID NO: 214 - protein, 330 aa, Homo sapiens [sequence omitted]

SEQ ID NO: 215 - protein, 478 aa, Homo sapiens; identical to SEQ ID NO: 17

SEQ ID NO: 216 - protein, 406 aa, Homo sapiens; identical to SEQ ID NO: 16

SEQ ID NO: 217 - protein, 1065 aa, Homo sapiens; identical to SEQ ID NO: 143

SEQ ID NO: 218 - protein, 525 aa, Homo sapiens; identical to SEQ ID NO: 155

SEQ ID NO: 219 - protein, 406 aa, Homo sapiens; identical to SEQ ID NO: 16

SEQ ID NO: 220 - protein, 201 aa, Homo sapiens; identical to SEQ ID NO: 4

SEQ ID NO: 221 - protein, 525 aa, Homo sapiens; identical to SEQ ID NO: 155

SEQ ID NO: 222 - protein, 418 aa, Homo sapiens
MPSSVSWGILLLAGLCCLVPVSLAEDPQGDAAQKTDTSHHDQDHPTFNKITPNLAEFAFSLYRQLAHQSNSTNIFFSPVSIATAFAMLSLGTKADTHDEILEGLNFNLTEIPEAQIHEGFQELLRTLNQPDSQLQLTTGNGLFLSEGLKLVDKFLEDVKKLYHSEAFTVNFGDTEEAKKQINDYVEKGTQGKIVDLVKELDRDTVFALVNYIFFKGKWERPFEVKDTEEEDFHVDQVTTVKVPMMKRLGMFNIQHCKKLSSWVLLMKYLGNATAIFFLPDEGKLQHLENELTHDIITKFLENEDRRSASLHLPKLSITGTYDLKSVLGQLGITKVFSNGADLSGVTEEAPLKLSKAVHKAVLTIDEKGTEAAGAMFLEAIPMSIPPEVKFNKPFVFLMIEQNTKSPLFMGKVVNPTQK

SEQ ID NO: 223 - protein, 644 aa, Homo sapiens
MKLITILFLCSRLLLSLTQESQSEEIDCNDKDLFKAVDAALKKYNSQNQSNNQFVLYRITEATKTVGSDTFYSFKYEIKEGDCPVQSGKTWQDCEYKDAAKAATGECTATVGKRSSTKFSVATQTCQITPAEGPVVTAQYDCLGCVHPISTQSPDLEPILRHGIQYFNNNTQHSSLFMLNEVKRAQRQVVAGLNFRITYSIVQTNCSKENFLFLTPDCKSLWNGDTGECTDNAYIDIQLRIASFSQNCDIYPGKDFVQPPTKICVGCPRDIPTNSPELEETLTHTITKLNAENNATFYFKIDNVKKARVQVVAGKKYFIDFVARETTCSKESNEELTESCETKKLGQSLDCNAEVYVVPWEKKIYPTVNCQPLGMISLMKRPPGFSPFRSSRIGEIKEETTVSPPHTSMAPAQDEERDSGKEQGHTRRHDWGHEKQRKHNLGHGHKHERDQGHGHQRGHGLGHGHEQQHGLGHGHKFKLDDDLEHQGGHVLDHGHKHKHGHGHGKHKNKGKKNGKHNGWKTEHLASSSEDSTTPSAQTQEKTEGPTPIPSLAKPGVTVTFSDFQDSDLIATMMPPISPAPIQSDDDWIPDIQIDPNGLSFNPISDFPDTTSPKCPGRPWKSVSEINPTTQMKESYYFDLTDGLS

SEQ ID NO: 224 - protein, 698 aa, Homo sapiens; identical to SEQ ID NO: 15

SEQ ID NO: 225 - protein, 326 aa, Homo sapiens; identical to SEQ ID NO: 2

SEQ ID NO: 226 - protein, 698 aa, Homo sapiens; identical to SEQ ID NO: 15

SEQ ID NO: 227 - protein, 201 aa, Homo sapiens; identical to SEQ ID NO: 4

SEQ ID NO: 228 - protein, 1065 aa, Homo sapiens; identical to SEQ ID NO: 143

SEQ ID NO: 229 - protein, 418 aa, Homo sapiens; identical to SEQ ID NO: 222

SEQ ID NO: 230 - protein, 638 aa, Homo sapiens; identical to SEQ ID NO: 7

SEQ ID NO: 231 - protein, 330 aa, Homo sapiens [sequence omitted]

SEQ ID NO: 232 - protein, 406 aa, Homo sapiens; identical to SEQ ID NO: 16

SEQ ID NO: 233 - protein, 367 aa, Homo sapiens; identical to SEQ ID NO: 9

SEQ ID NO: 234 - protein, 406 aa, Homo sapiens; identical to SEQ ID NO: 16

SEQ ID NO: 235 - protein, 1231 aa, Homo sapiens; identical to SEQ ID NO: 12

SEQ ID NO: 236 - protein, 201 aa, Homo sapiens; identical to SEQ ID NO: 4

SEQ ID NO: 237 - protein, 500 aa, Homo sapiens; identical to SEQ ID NO: 136

SEQ ID NO: 238 - protein, 462 aa, Homo sapiens; identical to SEQ ID NO: 13

SEQ ID NO: 239 - protein, 638 aa, Homo sapiens; identical to SEQ ID NO: 7

SEQ ID NO: 240 - protein, 159 aa, Homo sapiens
MKNHLLFWGVLAVFIKAVHVKAQEDERIVLVDNKCKCARITSRIIRSSEDPNEDIVERNIRIIVPLNNRENISDPTSPLRTRFVYHLSDLCKKCDPTEVELDNQIVTATQSNICDEDSATETCYTYDRNKCYTAVVPLVYGGETKMVETALTPDACYPD

SEQ ID NO: 241 - protein, 201 aa, Homo sapiens; identical to SEQ ID NO: 4

SEQ ID NO: 242 - protein, 698 aa, Homo sapiens; identical to SEQ ID NO: 15

SEQ ID NO: 243 - protein, 453 aa, Homo sapiens; identical to SEQ ID NO: 139

SEQ ID NO: 244 - protein, 644 aa, Homo sapiens; identical to SEQ ID NO: 223

SEQ ID NO: 245 - protein, 330 aa, Homo sapiens
MWLLVSVILISRISSVGGEATFCDFPKINHGILYDEEKYKPFSQVPTGEVFYYSCEYNFVSPSKSFWTRITCTEEGWSPTPKCLRLCFFPFVENGHSESSGQTHLEGDTVQIICNTGYRLQNNENNISCVERGWSTPPKCRSTDTSCVNPPTVQNAHILSRQMSKYPSGERVRYECRSPYEMFGDEEVMCLNGNWTEPPQCKDSTGKCGPPPPIDNGDITSFPLSVYAPASSVEYQCQNLYQLEGNKRITCRNGQWSEPPKCLHPCVISREIMENYNIALRWTAKQKLYLRTGESAEFVCKRGYRLSSRSHTLRTTCWDGKLEYPTCAKR

SEQ ID NO: 246 - protein, 330 aa, Homo sapiens [sequence omitted]

SEQ ID NO: 247 - protein, 201 aa, Homo sapiens; identical to SEQ ID NO: 4

SEQ ID NO: 248 - protein, 418 aa, Homo sapiens; identical to SEQ ID NO: 222

SEQ ID NO: 249 - protein, 644 aa, Homo sapiens; identical to SEQ ID NO: 223

SEQ ID NO: 250 - protein, 752 aa, Homo sapiens
MGPLMVLFCLLFLYPGLADSAPSCPQNVNISGGTFTLSHGWAPGSLLTYSCPQGLYPSPASRLCKSSGQWQTPGATRSLSKAVCKPVRCPAPVSFENGIYTPRLGSYPVGGNVSFECEDGFILRGSPVRQCRPNGMWDGETAVCDNGAGHCPNPGISLGAVRTGFRFGHGDKVRYRCSSNLVLTGSSERECQGNGVWSGTEPICRQPYSYDFPEDVAPALGTSFSHMLGATNPTQKTKESLGRKIQIQRSGHLNLYLLLDCSQSVSENDFLIFKESASLMVDRIFSFEINVSVAIITFASEPKVLMSVLNDNSRDMTEVISSLENANYKDHENGTGTNTYAALNSVYLMMNNQMRLLGMETMAWQEIRHAIILLTDGKSNMGGSPKTAVDHIREILNINQKRNDYLDIYAIGVGKLDVDWRELNELGSKKDGERHAFILQDTKALHQVFEHMLDVSKLTDTICGVGNMSANASDQERTPWHVTIKPKSQETCRGALISDQWVLTAAHCFRDGNDHSLWRVNVGDPKSQWGKEFLIEKAVISPGFDVFAKKNQGILEFYGDDIALLKLAQKVKMSTHARPICLPCTMEANLALRRPQGSTCRDHENELLNKQSVPAHFVALNGSKLNINLKMGVEWTSCAEVVSQEKTMFPNLTDVREVVTDQFLCSGTQEDESPCKGESGGAVFLERRFRFFQVGLVSWGLYNPCLGSADKNSRKRAPRSKVPPPRDFHINLFRMQPWLRQHLGDVLNFLPL

SEQ ID NO: 251 - protein, 525 aa, Homo sapiens; identical to SEQ ID NO: 155

SEQ ID NO: 252 - protein, 189 aa, Homo sapiens
MVMLLLLLSALAGLFGAAEGQAFHLGKCPNPPVQENFDVNKYLGRWYEIEKIPTTFENGRCIQANYSLMENGKIKVLNQELRADGTVNQIEGEATPVNLTEPAKLEVKFSWFMPSAPYWILATDYENYALVYSCTCIIQLFHVDFAWILARNPNLPPETVDSLKNILTSNNIDVKKMTVTDQVNCPKLS

SEQ ID NO: 253 - protein, 599 aa, Homo sapiens
MKLLKLTGFIFFLFFLTESLTLPTQPRDIENFNSTQKFIEDNIEYITIIAFAQYVQEATFEEMEKLVKDMVEYKDRCMADKTLPECSKLPNNVLQEKICAMEGLPQKHNFSHCCSKVDAQRRLCFFYNKKSDVGFLPPFPTLDPEEKCQAYESNRESLLNHFLYEVARRNPFVFAPTLLTVAVHFEEVAKSCCEEQNKVNCLQTRAIPVTQYLKAFSSYQKHVCGALLKFGTKVVHFIYIAILSQKFPKIEFKELISLVEDVSSNYDGCCEGDVVQCIRDTSKVMNHICSKQDSISSKIKECCEKKIPERGQCIINSNKDDRPKDLSLREGKFTDSENVCQERDADPDTFFAKFTFEYSRRHPDLSIPELLRIVQIYKDLLRNCCNTENPPGCYRYAEDKFNETTEKSLKMVQQECKHFQNLGKDGLKYHYLIRLTKIAPQLSTEELVSLGEKMVTAFTTCCTLSEEFACVDNLADLVFGELCGVNENRTINPAVDHCCKTNFAFRRPCFESLKADKTYVPPPFSQDLFTFHADMCQSQNEELQRKTDRFLVNLVKLKHELTDEELQSLFTNFANVVDKCCKAESPEVCFNEESPKIGN

SEQ ID NO: 254-299 - skipped (46 entries)

SEQ ID NO: 300 - protein, 30 aa, Artificial Sequence; identical to SEQ ID NO: 103
  Synthetic Construct

SEQ ID NO: 301 - protein, 10 aa, Artificial Sequence
  Synthetic Construct
DIENFNSTQK

SEQ ID NO: 302 - protein, 15 aa, Artificial Sequence
  Synthetic Construct
QDQCIYNTTYLNVQR

SEQ ID NO: 303 - protein, 24 aa, Artificial Sequence
  Synthetic Construct
SVQEIQATFFYFTPNKTEDTIFLR

SEQ ID NO: 304 - protein, 13 aa, Artificial Sequence
  Synthetic Construct
ISEENETTCYMGK

SEQ ID NO: 305 - protein, 13 aa, Artificial Sequence
  Synthetic Construct
NLFLNHSENATAK

SEQ ID NO: 306 - protein, 13 aa, Artificial Sequence
  Synthetic Construct
NLFLNHSENATAK

SEQ ID NO: 307 - protein, 16 aa, Artificial Sequence
  Synthetic Construct
VVLHPNYSQVDIGLIK

SEQ ID NO: 308 - protein, 9 aa, Artificial Sequence
  Synthetic Construct
EEQYNSTYR

SEQ ID NO: 309 - protein, 21 aa, Artificial Sequence
  Synthetic Construct
QQQHLFGSNVTDCSGNFCLFR

SEQ ID NO: 310 - protein, 24 aa, Artificial Sequence
  Synthetic Construct
QIPLCANLVPVPITNATLDQITGK

SEQ ID NO: 311 - protein, 20 aa, Artificial Sequence
  Synthetic Construct
ACLNSTYEYIFNNCHELYSR

SEQ ID NO: 312 - protein, 32 aa, Artificial Sequence; identical to SEQ ID NO: 181
  Synthetic Construct

SEQ ID NO: 313 - protein, 16 aa, Artificial Sequence
  Synthetic Construct
YLGNATAIFFLPDEGK

SEQ ID NO: 314 - protein, 16 aa, Artificial Sequence
  Synthetic Construct
YLGNATAIFFLPDEGK

SEQ ID NO: 315 - protein, 16 aa, Artificial Sequence
  Synthetic Construct
YLGNATAIFFLPDEGK

SEQ ID NO: 316 - protein, 33 aa, Artificial Sequence; identical to SEQ ID NO: 124
  Synthetic Construct

SEQ ID NO: 317 - protein, 32 aa, Artificial Sequence; identical to SEQ ID NO: 29
  Synthetic Construct

SEQ ID NO: 318 - protein, 32 aa, Artificial Sequence; identical to SEQ ID NO: 29
  Synthetic Construct

SEQ ID NO: 319 - protein, 20 aa, Artificial Sequence
  Synthetic Construct
FNLTETSEAEIHQSFQHLLR

SEQ ID NO: 320 - protein, 20 aa, Artificial Sequence
  Synthetic Construct
TLNQSSDELQLSMGNAMFVK

SEQ ID NO: 321 - protein, 16 aa, Artificial Sequence
  Synthetic Construct
YTGNASALFILPDQDK

SEQ ID NO: 322 - protein, 16 aa, Artificial Sequence
  Synthetic Construct
YTGNASALFILPDQDK

SEQ ID NO: 323 - protein, 16 aa, Artificial Sequence
  Synthetic Construct
YTGNASALFILPDQDK

SEQ ID NO: 324 - protein, 7 aa, Artificial Sequence
  Synthetic Construct
ENGTISR

SEQ ID NO: 325 - protein, 24 aa, Artificial Sequence
  Synthetic Construct
QIPLCANLVPVPITNATLDQITGK

SEQ ID NO: 326 - protein, 24 aa, Artificial Sequence
  Synthetic Construct
QIPLCANLVPVPITNATLDQITGK

SEQ ID NO: 327 - protein, 15 aa, Artificial Sequence
  Synthetic Construct
QDQCIYNTTYLNVQR

SEQ ID NO: 328 - protein, 15 aa, Artificial Sequence
  Synthetic Construct
QDQCIYNTTYLNVQR

SEQ ID NO: 329 - protein, 15 aa, Artificial Sequence
  Synthetic Construct
QDQCIYNTTYLNVQR

SEQ ID NO: 330 - protein, 15 aa, Artificial Sequence
  Synthetic Construct
QDQCIYNTTYLNVQR

SEQ ID NO: 331 - protein, 19 aa, Artificial Sequence
  Synthetic Construct
FSEFWDLDPEVRPTSAVAA

SEQ ID NO: 332 - protein, 22 aa, Artificial Sequence
  Synthetic Construct
ADGTVNQIEGEATPVNLTEPAK

SEQ ID NO: 333 - protein, 16 aa, Artificial Sequence
  Synthetic Construct
EHEGAIYPDNTTDFQR

SEQ ID NO: 334 - protein, 16 aa, Artificial Sequence
  Synthetic Construct
EHEGAIYPDNTTDFQR

SEQ ID NO: 335 - protein, 20 aa, Artificial Sequence
  Synthetic Construct
ENLTAPGSDSAVFFEQGTTR

SEQ ID NO: 336 - protein, 17 aa, Artificial Sequence
  Synthetic Construct
ELHHLQEQNVSNAFLDK

SEQ ID NO: 337 - protein, 17 aa, Artificial Sequence
  Synthetic Construct
ELHHLQEQNVSNAFLDK

SEQ ID NO: 338 - protein, 13 aa, Artificial Sequence
  Synthetic Construct
MDGASNVTCINSR

SEQ ID NO: 339 - protein, 13 aa, Artificial Sequence
  Synthetic Construct
MDGASNVTCINSR

SEQ ID NO: 340 - protein, 18 aa, Artificial Sequence
  Synthetic Construct
IPCSQPPQIEHGTINSSR

SEQ ID NO: 341 - protein, 14 aa, Artificial Sequence
  Synthetic Construct
LANLTQGEDQYYLR

SEQ ID NO: 342 - protein, 14 aa, Artificial Sequence
  Synthetic Construct
QSVPAHFVALNGSK

SEQ ID NO: 343 - protein, 6 aa, Artificial Sequence
  Synthetic Construct
ANISHK

SEQ ID NO: 344 - protein, 15 aa, Artificial Sequence
  Synthetic Construct
EYESYSDFERNVTEK

SEQ ID NO: 345 - protein, 13 aa, Artificial Sequence
  Synthetic Construct
WNCWSNWSSCSGR

SEQ ID NO: 346 - protein, 15 aa, Artificial Sequence
  Synthetic Construct
VCQDCPLLAPLNDTR

SEQ ID NO: 347 - protein, 15 aa, Artificial Sequence
  Synthetic Construct
VCQDCPLLAPLNDTR

SEQ ID NO: 348 - protein, 22 aa, Artificial Sequence
  Synthetic Construct
AALAAFNAQNNGSNFQLEEISR

SEQ ID NO: 349 - protein, 22 aa, Artificial Sequence
  Synthetic Construct
AALAAFNAQNNGSNFQLEEISR

SEQ ID NO: 350 - protein, 13 aa, Artificial Sequence
  Synthetic Construct
LQNNENNISCVER

SEQ ID NO: 351 - protein, 13 aa, Artificial Sequence
  Synthetic Construct
SWPAVGNCSSALR

SEQ ID NO: 352 - protein, 13 aa, Artificial Sequence
  Synthetic Construct
SWPAVGNCSSALR

SEQ ID NO: 353 - protein, 16 aa, Artificial Sequence
  Synthetic Construct
ALPQPQNVTSLLGCTH

SEQ ID NO: 354 - protein, 24 aa, Artificial Sequence
  Synthetic Construct
MVSHHNLTTGATLINEQWLLTTAK

SEQ ID NO: 355 - protein, 24 aa, Artificial Sequence
  Synthetic Construct
MVSHHNLTTGATLINEQWLLTTAK

SEQ ID NO: 356 - protein, 24 aa, Artificial Sequence
  Synthetic Construct
MVSHHNLTTGATLINEQWLLTTAK

SEQ ID NO: 357 - protein, 13 aa, Artificial Sequence
  Synthetic Construct
NLFLNHSENATAK

SEQ ID NO: 358 - protein, 13 aa, Artificial Sequence
  Synthetic Construct
NLFLNHSENATAK

SEQ ID NO: 359 - protein, 16 aa, Artificial Sequence
  Synthetic Construct
VVLHPNYSQVDIGLIK

SEQ ID NO: 360 - protein, 16 aa, Artificial Sequence
  Synthetic Construct
VVLHPNYSQVDIGLIK

SEQ ID NO: 361 - protein, 19 aa, Artificial Sequence
  Synthetic Construct
VIDFNCTTSSVSSALANTK

SEQ ID NO: 362 - protein, 19 aa, Artificial Sequence
  Synthetic Construct
VIDFNCTTSSVSSALANTK

SEQ ID NO: 363 - protein, 14 aa, Artificial Sequence
  Synthetic Construct
SSTTKPPFKPHGSR

SEQ ID NO: 364 - protein, 14 aa, Artificial Sequence
  Synthetic Construct
HSHNNNSSDLHPHK

SEQ ID NO: 365 - protein, 19 aa, Artificial Sequence
  Synthetic Construct
VLSNNSDANLELINTWVAK

SEQ ID NO: 366 - protein, 21 aa, Artificial Sequence
  Synthetic Construct
VGQLQLSHNLSLVILVPQNLK

SEQ ID NO: 367 - protein, 8 aa, Artificial Sequence
  Synthetic Construct
VATTVISK

SEQ ID NO: 368 - protein, 27 aa, Artificial Sequence
  Synthetic Construct
LSLHRPALEDLLLGSEANLTCTLTGLR

SEQ ID NO: 369 - protein, 27 aa, Artificial Sequence
  Synthetic Construct
LSLHRPALEDLLLGSEANLTCTLTGLR

SEQ ID NO: 370 - protein, 27 aa, Artificial Sequence
  Synthetic Construct
LSLHRPALEDLLLGSEANLTCTLTGLR

SEQ ID NO: 371 - protein, 27 aa, Artificial Sequence
  Synthetic Construct
LSLHRPALEDLLLGSEANLTCTLTGLR

SEQ ID NO: 372 - protein, 27 aa, Artificial Sequence
  Synthetic Construct
LSLHRPALEDLLLGSEANLTCTLTGLR

SEQ ID NO: 373 - protein, 9 aa, Artificial Sequence
  Synthetic Construct
TPLTANITK

SEQ ID NO: 374 - protein, 9 aa, Artificial Sequence
  Synthetic Construct
EEQYNSTYR

SEQ ID NO: 375 - protein, 9 aa, Artificial Sequence
  Synthetic Construct
EEQYNSTYR

SEQ ID NO: 376 - protein, 9 aa, Artificial Sequence
  Synthetic Construct
EEQYNSTYR

SEQ ID NO: 377 - protein, 9 aa, Artificial Sequence
  Synthetic Construct
EEQYNSTYR

SEQ ID NO: 378 - protein, 9 aa, Artificial Sequence
  Synthetic Construct
EEQYNSTYR

SEQ ID NO: 379 - protein, 9 aa, Artificial Sequence
  Synthetic Construct
EEQYNSTYR

SEQ ID NO: 380 - protein, 9 aa, Artificial Sequence
  Synthetic Construct
EEQYNSTYR

SEQ ID NO: 381 - protein, 9 aa, Artificial Sequence
  Synthetic Construct
EEQYNSTYR

SEQ ID NO: 382 - protein, 9 aa, Artificial Sequence
  Synthetic Construct
EEQFNSTFR

SEQ ID NO: 383 - protein, 9 aa, Artificial Sequence
  Synthetic Construct
EEQFNSTFR

SEQ ID NO: 384 - protein, 9 aa, Artificial Sequence
  Synthetic Construct
EEQFNSTFR

SEQ ID NO: 385 - protein, 9 aa, Artificial Sequence
  Synthetic Construct
EEQFNSTFR

SEQ ID NO: 386 - protein, 9 aa, Artificial Sequence
  Synthetic Construct
EEQFNSTFR

SEQ ID NO: 387 - protein, 9 aa, Artificial Sequence
  Synthetic Construct
EEQYNSTFR

SEQ ID NO: 388 - protein, 9 aa, Artificial Sequence
  Synthetic Construct
EEQYNSTFR

SEQ ID NO: 389 - protein, 11 aa, Artificial Sequence
  Synthetic Construct
ENISDPTSPLR

SEQ ID NO: 390 - protein, 21 aa, Artificial Sequence
  Synthetic Construct
GLTFQQNASSMCVPDQDTAIR

SEQ ID NO: 391 - protein, 21 aa, Artificial Sequence
  Synthetic Construct
GLTFQQNASSMCVPDQDTAIR

SEQ ID NO: 392 - protein, 21 aa, Artificial Sequence
  Synthetic Construct
GLTFQQNASSMCVPDQDTAIR

SEQ ID NO: 393 - protein, 21 aa, Artificial Sequence
  Synthetic Construct
GLTFQQNASSMCVPDQDTAIR

SEQ ID NO: 394 - protein, 25 aa, Artificial Sequence
  Synthetic Construct
LPTQNITFQTESSVAEQEAEFQSPK

SEQ ID NO: 395 - protein, 8 aa, Artificial Sequence
  Synthetic Construct
GVNFNVSK

SEQ ID NO: 396 - protein, 21 aa, Artificial Sequence
  Synthetic Construct
IVGGTNSSWGEWPWQVSLQVK

SEQ ID NO: 397 - protein, 19 aa, Artificial Sequence
  Synthetic Construct
LQAPLNYTEFQKPICLPSK

SEQ ID NO: 398 - protein, 19 aa, Artificial Sequence
  Synthetic Construct
LQAPLNYTEFQKPICLPSK

SEQ ID NO: 399 - protein, 43 aa, Artificial Sequence; identical to SEQ ID NO: 197
  Synthetic Construct

SEQ ID NO: 400 - protein, 12 aa, Artificial Sequence
  Synthetic Construct
ITYSIVQTNCSK

SEQ ID NO: 401 - protein, 12 aa, Artificial Sequence
  Synthetic Construct
LNAENNATFYFK

SEQ ID NO: 402 - protein, 21 aa, Artificial Sequence
  Synthetic Construct
TPEVTCVVVDVSHEDPEVQFK

SEQ ID NO: 403 - protein, 8 aa, Artificial Sequence
  Synthetic Construct
AVLTIDEK

SEQ ID NO: 404 - protein, 10 aa, Artificial Sequence
  Synthetic Construct
DLLLPQPDLR

SEQ ID NO: 405 - protein, 13 aa, Artificial Sequence
  Synthetic Construct
SLDFTELDVAAEK

SEQ ID NO: 406 - protein, 10 aa, Artificial Sequence
  Synthetic Construct
VNHVTLSQPK

SEQ ID NO: 407 - protein, 17 aa, Artificial Sequence
  Synthetic Construct
TTPPVLDSDGSFFLYSR

SEQ ID NO: 408 - protein, 8 aa, Artificial Sequence
  Synthetic Construct
DDTVCLAK

SEQ ID NO: 409 - protein, 15 aa, Artificial Sequence
  Synthetic Construct
VTACHSSQPNATLYK

SEQ ID NO: 410 - protein, 26 aa, Artificial Sequence
  Synthetic Construct
WVLTAAHCLLYPPWDKNFTENDLLVR

SEQ ID NO: 411 - protein, 13 aa, Artificial Sequence
  Synthetic Construct
CGLVPVLAENYNK

SEQ ID NO: 412 - protein, 21 aa, Artificial Sequence
  Synthetic Construct
QQQHLFGSNVTDCSGNFCLFR

SEQ ID NO: 413 - protein, 21 aa, Artificial Sequence
  Synthetic Construct
QQQHLFGSNVTDCSGNFCLFR

SEQ ID NO: 414 - protein, 21 aa, Artificial Sequence
  Synthetic Construct
QQQHLFGSNVTDCSGNFCLFR

SEQ ID NO: 415 - protein, 21 aa, Artificial Sequence
  Synthetic Construct
QQQHLFGSNVTDCSGNFCLFR

SEQ ID NO: 416 - protein, 8 aa, Artificial Sequence
  Synthetic Construct
NGSLFAFR

SEQ ID NO: 417 - protein, 23 aa, Artificial Sequence
  Synthetic Construct
NNATVHEQVGGPSLTSDLQAQSK

SEQ ID NO: 418 - protein, 22 aa, Artificial Sequence
  Synthetic Construct
VTQVYAENGTVLQGSTVASVYK

SEQ ID NO: 419 - protein, 20 aa, Artificial Sequence
  Synthetic Construct
ACLNSTYEYIFNNCHELYSR

SEQ ID NO: 420 - protein, 15 aa, Artificial Sequence
  Synthetic Construct
NPWGQVEWNGSWSDR

SEQ ID NO: 421 - protein, 20 aa, Artificial Sequence
  Synthetic Construct
ACLNSTYEYIFNNCHELYSR

SEQ ID NO: 422 - protein, 15 aa, Artificial Sequence
  Synthetic Construct
NPWGQVEWNGSWSDR

SEQ ID NO: 423 - protein, 20 aa, Artificial Sequence
  Synthetic Construct
FNLTETSEAEIHQSFQHLLR

SEQ ID NO: 424 - protein, 32 aa, Artificial Sequence; identical to SEQ ID NO: 181
  Synthetic Construct

SEQ ID NO: 425 - protein, 24 aa, Artificial Sequence
  Synthetic Construct
QIPLCANLVPVPITNATLDQITGK

SEQ ID NO: 426 - protein, 22 aa, Artificial Sequence
  Synthetic Construct
AALAAFNAQNNGSNFQLEEISR

SEQ ID NO: 427 - protein, 25 aa, Artificial Sequence
  Synthetic Construct
LPTQNITFQTESSVAEQEAEFQSPK

SEQ ID NO: 428 - protein, 22 aa, Artificial Sequence
  Synthetic Construct
VTQVYAENGTVLQGSTVASVYK

SEQ ID NO: 429 - protein, 24 aa, Artificial Sequence
  Synthetic Construct
QIPLCANLVPVPITNATLDQITGK

SEQ ID NO: 430 - protein, 418 aa, Homo sapiens; identical to SEQ ID NO: 222

SEQ ID NO: 431 - protein, 1474 aa, Homo sapiens; identical to SEQ ID NO: 11

SEQ ID NO: 432 - protein, 638 aa, Homo sapiens; identical to SEQ ID NO: 7

SEQ ID NO: 433 - protein, 622 aa, Homo sapiens; identical to SEQ ID NO: 145

SEQ ID NO: 434 - protein, 1065 aa, Homo sapiens; identical to SEQ ID NO: 143

SEQ ID NO: 435 - protein, 622 aa, Homo sapiens; identical to SEQ ID NO: 145

SEQ ID NO: 436 - protein, 406 aa, Homo sapiens; identical to SEQ ID NO: 16

SEQ ID NO: 437 - protein, 423 aa, Homo sapiens; identical to SEQ ID NO: 8

SEQ ID NO: 438 - protein, 476 aa, Homo sapiens; identical to SEQ ID NO: 133

SEQ ID NO: 439 - protein, 1474 aa, Homo sapiens; identical to SEQ ID NO: 11

SEQ ID NO: 440 - protein, 1676 aa, Homo sapiens; identical to SEQ ID NO: 148

SEQ ID NO: 441 - protein, 644 aa, Homo sapiens; identical to SEQ ID NO: 223

SEQ ID NO: 442 - protein, 159 aa, Homo sapiens; identical to SEQ ID NO: 240

SEQ ID NO: 443 - protein, 330 aa, Homo sapiens [sequence omitted]

SEQ ID NO: 444 - protein, 327 aa, Homo sapiens; identical to SEQ ID NO: 19

SEQ ID NO: 445 - protein, 453 aa, Homo sapiens; identical to SEQ ID NO: 139

SEQ ID NO: 446 - protein, 340 aa, Homo sapiens; identical to SEQ ID NO: 20

SEQ ID NO: 447 - protein, 99 aa, Homo sapiens; identical to SEQ ID NO: 138

SEQ ID NO: 448 - protein, 347 aa, Homo sapiens; identical to SEQ ID NO: 132

SEQ ID NO: 449 - protein, 201 aa, Homo sapiens; identical to SEQ ID NO: 4

SEQ ID NO: 450 - protein, 367 aa, Homo sapiens; identical to SEQ ID NO: 9

SEQ ID NO: 451 - protein, 698 aa, Homo sapiens; identical to SEQ ID NO: 15

SEQ ID NO: 452 - protein, 462 aa, Homo sapiens; identical to SEQ ID NO: 13

SEQ ID NO: 453 - protein, 638 aa, Homo sapiens; identical to SEQ ID NO: 7

SEQ ID NO: 454 - protein, 478 aa, Homo sapiens; identical to SEQ ID NO: 17

SEQ ID NO: 455 - protein, 525 aa, Homo sapiens; identical to SEQ ID NO: 155

SEQ ID NO: 456 - protein, 189 aa, Homo sapiens; identical to SEQ ID NO: 252

SEQ ID NO: 457 - protein, 500 aa, Homo sapiens; identical to SEQ ID NO: 136

SEQ ID NO: 458 - protein, 415 aa, Homo sapiens; identical to SEQ ID NO: 3

SEQ ID NO: 459 - protein, 752 aa, Homo sapiens; identical to SEQ ID NO: 250

SEQ ID NO: 460 - protein, 591 aa, Homo sapiens; identical to SEQ ID NO: 5

SEQ ID NO: 461 - protein, 1231 aa, Homo sapiens; identical to SEQ ID NO: 12

SEQ ID NO: 462 - protein, 449 aa, Homo sapiens; identical to SEQ ID NO: 10

SEQ ID NO: 463 - protein, 821 aa, Homo sapiens
MPTVISASVAPRTAAEPRSPGPVPHPAQSKATEAGGGNPSGIYSAIISRNFPIIGVKEKTFEQLHKKCLEKKVLYVDPEFPPDETSLFYSQKFPIQFVWKRPPEICENPRFIIDGANRTDICQGELGDCWFLAAIACLTLNQHLLFRVIPHDQSFIENYAGIFHFQFWRYGEWVDVVIDDCLPTYNNQLVFTKSNHRNEFWSALLEKAYAKLHGSYEALKGGNTTEAMEDFTGGVAEFFEIRDAPSDMYKIMKKAIERGSLMGCSIDDGTNMTYGTSPSGLNMGELIARMVRNMDNSLLQDSDLDPRGSDERPTRTIIPVQYETRMACGLVRGHAYSVTGLDEVPFKGEKVKLVRLRNPWGQVEWNGSWSDRWKDWSFVDKDEKARLQHQVTEDGEFWMSYEDFIYHFTKLEICNLTADALQSDKLQTWTVSVNEGRWVRGCSAGGCRNFPDTFWTNPQYRLKLLEEDDDPDDSEVICSFLVALMQKNRRKDRKLGASLFTIGFAIYEVPKEMHGNKQHLQKDFFLYNASKARSKTYINMREVSQRFRLPPSEYVIVPSTYEPHQEGEFILRVFSEKRNLSEEVENTISVDRPVKKKKTKPIIFVSDRANSNKELGVDQESEEGKGKTSPDKQKQSPQPQPGSSDQESEEQQQFRNIFKQIAGDDMEICADELKKVLNTVVNKHKDLKTHGFTLESCRSMIALMDTDGSGKLNLQEFHHLWNKIKAWQKIFKHYDTDQSGTINSYEMRNAVNDAGFHLNNQLYDIITMRYADKHMNIDFDSFICCFVRLEGMFRAFHAFDKDGDGIIKLNVLEWLQLTMYA

SEQ ID NO: 464 - protein, 355 aa, Homo sapiens [sequence omitted]

SEQ ID NO: 465 - protein, 599 aa, Homo sapiens; identical to SEQ ID NO: 253

SEQ ID NO: 466 - protein, 119 aa, Homo sapiens; identical to SEQ ID NO: 141

SEQ ID NO: 467 - protein, 330 aa, Homo sapiens; identical to SEQ ID NO: 245

SEQ ID NO: 468 - protein, 930 aa, Homo sapiens; identical to SEQ ID NO: 18

SEQ ID NO: 469 - protein, 1703 aa, Homo sapiens
MSLLCVGVKKAKFDGAQEKFNTYVTLKVQNVKSTTIAVRGSQPSWEQDFMFEINRLDLGLTVEVWNKGLIWDTMVGTVWIPLRTIRQSNEEGPGEWLTLDSQVIMADSEICGTKDPTFHRILLDTRFELPLDIPEEEARYWAKKLEQLNAMRDQDEYSFQDEQDKPLPVPSNQCCNWNYFGWGEQHNDDPDSAVDDRDSDYRSETSNSIPPPYYTTSQPNASVHQYSVRPPPLGSRESYSDSMHSYEEFSEPQALSPTGSSRYASSGELSQGSSQLSEDFDPDEHSLQGSDMEDERDRDSYHSCHSSVSYHKDSPRWDQDEEELEEDLEDFLEEEELPEDEEELEEEEEEVPDDLGSYAQREDVAVAEPKDFKRISLPPAAPGKEDKAPVAPTEAPDMAKVAPKPATPDKVPAAEQIPEAEPPKDEESFRPREDEEGQEGQDSMSRAKANWLRAFNKVRMQLQEARGEGEMSKSLWFKGGPGGGLIIIDSMPDIRKRKPIPLVSDLAMSLVQSRKAGITSALASSTLNNEELKNHVYKKTLQALIYPISCTTPHNFEVWTATTPTYCYECEGLLWGIARQGMRCTECGVKCHEKCQDLLNADCLQRAAEKSSKHGAEDRTQNIIMVLKDRMKIRERNKPEIFELIQEIFAVTKTAHTQQMKAVKQSVLDGTSKWSAKISITVVCAQGLQAKDKTGSSDPYVTVQVGKTKKRTKTIYGNLNPVWEENFHFECHNSSDRIKVRVWDEDDDIKSRVKQRFKRESDDFLGQTIIEVRTLSGEMDVWYNLDKRTDKSAVSGAIRLHISVEIKGEEKVAPYHVQYTCLHENLFHFVTDVQNNGVVKIPDAKGDDAWKVYYDETAQEIVDEFAMRYGVESIYQAMTHFACLSSKYMCPGVPAVMSTLLANINAYYAHTTASTNVSASDRFAASNFGKERFVKLLDQLHNSLRIDLSMYRNNFPASSPERLQDLKSTVDLLTSITFFRMKVQELQSPPRASQVVKDCVKACLNSTYEYIFNNCHELYSREYQTDPAKKGEVLPEEQGPSIKNLDFWSKLITLIVSIIEEDKNSYTPCLNQFPQELNVGKISAEVMWNLFAQDMKYAMEEHDKHRLCKSADYMNLHFKVKWLYNEYVTELPAFKDRVPEYPAWFEPFVIQWLDENEEVSRDFLHGALERDKKDGFQQTSEHALFSCSVVDVFSQLNQSFEIIKKLECPDPQIVGHYMRRFAKTISNVLLQYADIISKDFASYCSKEKEKVPCILMNNTQQLRVQLEKMFEAMGGKELDAEASDILKELQVKLNNVLDELSRVFATSFQPHIEECVKQMGDILSQVKGTGNVPASACSSVAQDADNVLQPIMDLLDSNLTLFAKICEKTVLKRVLKELWKLVMNTMEKTIVLPPLTDQTMIGNLLRKHGKGLEKGRVKLPSHSDGTQMIFNAAKELGQLSKLKDHMVREEAKSLTPKQCAVVELALDTIKQYFHAGGVGLKKTFLEKSPDLQSLRYALSLYTQATDLLIKTFVQTQSAQGLGVEDPVGEVSVHVELFTHPGTGEHKVTVKVVAANDLKWQTSGIFRPFIEVNIIGPQLSDKKRKFATKSKNNSWAPKYNESFQFTLSADAGPECYELQVCVKDYCFAREDRTVGLAVLQLRELAQRGSAACWLPLGRRIHMDDTGLTVLRILSQRSNDEVAKEFVKLKSDTRSAEEGGAAPAP

SEQ ID NO: 470 - protein, 201 aa, Homo sapiens
MALSWVLTVLSLLPLLEAQIPLCANLVPVPITNATLDRITGKWFYIASAFRNEEYNKSVQEIQATFFYFTPNKTEDTIFLREYQTRQNQCFYNSSYLNVQRENGTVSRYEGGREHVAHLLFLRDTKTLMFGSYLDDEKNWGLSFYADKPETTKEQLGEFYEALDCLCIPRSDVMYTDWKKDKCEPLEKQHEKERKQEEGES
